United States Patent Application Publication US 2026/0275333 A1 - sequence listing, part 13

SEQ ID NO: 3045 - RNA, 64444167 nt, Homo sapiens (residues 25,777,669-27,925,807 of 64,444,167)
  source 1..64444167: mol_type = mRNA
tgttaattaccgcgataaaacaagtattgtgctaaagtcagtgtggaataggaataaggtccagtggttgagatccagtccgattttaagatttgaaaagttgtgctgtgtgcccaacaggcacacacatcccattagtaagtaaattgtgcttttttaagaaagaaacaaaattactgtttctacttccattgcgtgttattttttatgtatacttgcaaatccatcaccaaaataaaaataatgaacatatccagcactcataaaagtttccccttgcccttttataatcccaaactttttctatcttcctaccttaccactctccctggcaatcaccaatctgtcactgtaaaatagtttgccttgtctagacatttatacaaatgaagtgtagtatggaccctttttaggaggcgtctggcatctttcacacagcataattattttgagattcagctacatggcaggcataaataggccattaattttatgactgagtagtatcctattgtgcagatcggtcacaacttatatatccatttgcctgctgatgggtttttgcattgcttctggttttggacttatgcaaatacatttgcaatgaacattcatgtatataagttcttctaactttgagtaaatattaggagtgtaataattaataggtttaggtttagttttaagagactgtcaaaatgtttgccaaaatggttgtaccattttatatttttatcagcagtatataagaattccacactcttgccaacattttgtatgggccttcttttaaaattttagacattttcctgtttgtacaatagtattttattgtggttccctaatgcctaataatatttagtatctatgtacgtacatgccatctgtatatatttggtaaagtgtatgttcacgtttattttgcttctttcttttttgtttttttctttgcttattttctcattattaaattttaatagtttctttatatactctggattcaaatcccttattagatatgagacttgccagtattttccccttgagttttcttttttgttctcataacactatctttcaaatagcagatgcttttaattttgatggggtccaatttattaattgttcttgtgcatttggtttttggggcttcatctaagacatttttgattaactgaacattacaaagattttttttctgtattttcatctaaaagttcatagcttttaatactttattttatatttaagtcaatggtcccataagcgacagagctttaacccaagtcgctgccgtgcatagctggacccaggggcttatataaaatcatcaagaaatgttctccttctttctcttgccacttttccttttgttttagcctcattttttccttctgaagatgactctcttctctctctgtagcaagagatagtgctacaaataacacacttactttgtcctcgcagaccacagtagtagaaaaagcaagagtccttcctgatgattccaaaaaaaaagtactgaaacagtggctatgatccaagggtagagtcttacatggtttcactgtgttagctaggatggtcttgatctcctgaccttgtgatccgcccaccttggcctcccaaggtactgcgattacaggcatgagctaccatgcctggccacaagacatagattttctatatgcacatcaagggaggtagtgttttaggttgctataggacagagctatcctgtattccagctggcttttttaatgatcacctctagggctggggctggtaggttgggtcaggcttagttggttctcattgaaatggtcctcaaagaaaaggggggctctcaagaggagagttgctgaacaccccacccaaaaatagccactgtgtacatacctacaattccttgacattttataagcaactggttgggtggaaaatgactagaaattcagttgtcattaactttcctttataatgtcagtagaatgagccatacatttcacatgttgtgggttatgtccatgatagtcatttctgtatattaagtatcaatttggagtatcatctgaagaaatataatattttgtgacgttatccttaaattaatatttttaggataaagaattataggataaaagaaaagtctaggatagaaataaaagaatagagaaaataggaacatggatataccgcagaaaatggccaaacaggaaaagtacttgtgagaggtattgaagtacataattgatatcacatagacctccagaaaattacaactactggcataagaacaaactatctgaatagtctttgctaatactgagtcttttctgcttgcaaaagaagtaagaatggtaaggaattgggacattgttcagataggcctcaatgcatttattcatttacctgttgatggggtttgggggtattaatgaaagatgttaataaataataatgggcatgtgaggtaatcataattgatttgtccatttggtctgaagaaaatgttgcctaccttcttttttgtcgagggattcatttttaatgccatgttggattctatggcttactaaatgtgtaattgcctatttatggattctgaagaattttataaaatgtatttgccaaacattttgaaagcttagaacttctccaaggaagaagttctttagtgctttagtgctgccctaacaaatatggtagccacagccatgtgaatattgaacacttgaaatgtggctaggctggactgagatgtgctgtcagggtaaaacacacaccagattttgaagacttagtaggaaataaaattaaacatatctaattaataacttttatattggttagacattgaaataatattttgtatgtatgttacatataaatatgcattcatgtgtatgtgtaattaatatcttcatatgaaatacttctcaattacaattggaagaatgatgactttgtggtggacaaatctggcacaaacttgatcatgtgcctcctgctgggatgtcctaggaagaccacagcattatttctgtgattttcttgtgaaagatacatgacctaagtctggatgtggaaacacatcagatggaaaaaggtgaacacatccttcataaatgcttatgctcttaaaactcttaaggttatgaaaaatagggaaaaaaagaggaactctttgaagttgaaagagcttaggagacatgacaattaatgcaatgggaaatcctggattggatcctggattacaaagttcaaaaaaactgtatttagggcacaactgagaaaatttgggtgagattatagcgtctgttgattggacagtagtgttgggtgaatgctgatatcctgatgtggatgattatattctggttatgagatcttttcccagattcctcatcatttgcccagtgggttcatggacaatgtggcgatggtagcaggagaagatgctacatgtttccaataacgtgaacttccctgcagcagtgctgcctactgcccagatgagtgccctgacggccgacaatgagcaataatgagaccctggatagaggaactgccttgcctagaccagacagatttctggtaatgtggtaataatattttttcccttccttcatggaagtggtaaagaattgccctcactggaatagatgcatatcagaatatggactccacttcatatgcttctgatagcatcaaattatttacatttgctgagttcttattctctgctatcatacaattactactgatgatggagcttattttacaagaaaagaagtgatgcgatgggcttcagcccatatttattggtcttgtgacatcccacatcacccagaggaatatgacctcacaagaatcagttacttcaccaactgtgagaccctgaggggctgggtttctatcctacaagatgtgttagaagccctgacccaagagccctgctacccagaatgcatggtttcatgtagcaaggatccttgtgatggtggtgatgatgatggtgaggatggtgatggtgaaggtggaggtggtgataatgaagtgatagttatgttgaggatgatgaaggtgatgatgatggtgagaatggtaaaggtgaacaaggtgatggtgagaatggcgagggtaagaatggtgatggcgatgatgatagtgttggtgattgtaaggatggtgatggcgatcatggtgatgaagataatggtgctgacagggctatgaggtaatggaggcagaaaagtggcagtttccaggaagtatagagccagctgggaactgcaaggtaaccttagtgggggtggaagatgtagggtccctgcctcatttctagacatctggagaaagctcacccctcacagtagttccaggaacccctccatccagcatttccttctcacaatcagcatggagcttttggggtgcagagaagtgtcttctattcactgcactctgtgggaagggaaaagggggagtgctatttatgaacccagtataatacagtagttactatgtgccaggcaacatgctgggtggttccttatatgttatctcatgaaatcctacagcaacacaaggagacaggcataactaccccattataaaaattctggtaaaataaactaaaatttactgtctagctatgtttaaatttacatttcagtggcattaaatacattcgcaatgttgtgcaaccaatttccagaatgcttttcatcttgtaaaactacaattctgtaactcatttaaaaacaactccccaatcaccaccctccccaggacctggtagccaccattgtccagtctgtctctatagatttgatgactctaggtgccttagaaaagtggaataatacaacatttgtctttttggtctggcttattttgctcagcctaatgtcctcaaggttcattcttgacactgcaggtgtcagaatctcctgccttttcaaggctgaacactattccactgtatgcatagacagcattttgttgatccgtccatccatccacggacacttgggttgcttccaccttttggttattgtggatgatgctgctctgaacatggttgtgcaagtatctcttccaggctagccccattatatagaagagtatagagagattctgggaggagggatgaccttcctggggcctttgttgaggtcctggtagaggatctcccagacctcaaaggcagatctcctctcctcaccccactgcctttcttaagacctgcctcctgctccaccacacagtgcccactccctggtactagacttgctaaggcctcttgatccctgaaagttcagggacaggaactggtgggcacaactacagtcactcacttctctgtcccctactgcagattctgtgccaaacaatacatgataatgacctgctttccactctttcaccagatgtggatgaggcacctactacatgccaggcatgtgtgggcactggacagagacccctgggaaataagtagatgtgagctcctcaaggccagggggatccctttcacttgctgctaccctgtgagggatggaggggcaccctgaagcattggagaggtgcatgagtgacctagctcagatgatgatatcatagtaaccctgtttattatttattatcacctaccatgtgccaggccttatgggaagtactttgcacacattacctgctataaagctcagagacaactgtaggagtgaatctgttatacctcccactttacaggggaggaaactgacacccagagaagtgaaccattcttcctcaggccttgcagctagtctctgggatgtggatccaggcggtctgacccagagatcccctcatcctcttggtttttgctcctgcagccctctggcctgtccccaggaccctgtaaccttggccacccccaagatgacctggacatgggcttcagcaaaggcagcaaccccagcatatctccatttgatagggaggaacctcaggcccaccacaggagccctgggctgcaggtggtataggtgctggctgaaccacagtgcacccatgttggaggatgcaacataggatgggcagcagcaggaggtctccctgcccaacaactggtagtggtacctgagaacaaaggaggagaaggaagctttggatacaggtgtggagaagcccaaggaggaagaaaaagacttggactatgggctgctggatggcctcaaggaccccctccccgaaaaggaattttgagacttatacccagggctgagatgaaagtgcttcctattttctatcctggaactgctgcaaacctcggtgtgacatcacagggcctcatttccctatttgtaaaatgggattttatgggggttcccatgagagactggaccgagagcattttgagaattgtaaaaaatgtacattgagggaataattattatcaatgggccattgctcttccaatagttagtattctttagcaaatattggaaggtaaaatatgatttattgaggaggtttgcagcagctgaggccctcaagagtcttttctgtctccgttcaaagctggtctctgacagggaccttcttggtgctacccctgggcccctcattctttgtgcaggcttctcagggttcttatttctattgtatcttgtggttccctggtggatggcatgctccatcttcactcagagctaactgcatctcctccaggcccatgtcccttgtgcagcacccattgctccctcaccaggattcaaaaccttctgtgactgacctctgctgacctcccaactttatctcccctcattctttctgctcctccagttacatgcctgagcccctcaatcctgtggctcacactctcacccaagctgttctccatcaggatttgcttggctcccttttctgctaggcaaatttgtgttcatccttccaagccttgcacagatgtcctcctctgaaagctctccctgaggtcacagagtcctggaacaaggtagtcattgctcctctgctgcctctgcattttgtgcctttatcactttggtgtgactgcccgcctcctgctgaatggaggcattttggctttactcacctcagtatctcctgggtccagctgggtgtctggcctggcccagaatcagtgctcatcaagggtgtatagaactcacaaggacccaggaatgttttgtaaataataccaccctcccacacttctccaatgcttactttctaagctcctttactctttgacattcaaatttctaaatggcctgtatgtatttacaaagcctgggaaaacgccttcagaggacaaacacaccccaccggcaaaatgtatttgcattgactaggattatggatgaaattcagccttctggcaaatgaatcatttggcattggctgagtatctgctctgtgccagatactaagctgtgatctctagaaagagacatgaactactgacacagtccttgaccccgaagagctcagaatccagtgagcttgatttcttgtaagttagagacagagttcagagcagaagctgaggcaggagaagagaagtaaaatggacacaccagaggcagtgacagccacacagctgtctggggacactgagtgcagcaacaaatagcttaggctgccttggcagcccacgaaggtatcacggtttcctattgcagcatctcagtgatgcttttgttatgctgatctctgcaaagcccctctgtaccccagcccaggatggtgactgccatgctgtggagaaaagggcagtgaccaggaccacaggctcagagcttgcaccctggaccacctgggaatgggagcccttcacatgttctctacctctgtgttcaggttgggggtcctggccaaggaagggagatgacccccatgctgggtcaaaaggacacactcccgggaacagactatctcttctttctgggtaatttctgcctctgcagtgaatggtgaaaccagacacatcctctctgttggtatgacacaaagacaggcgttcctgctcatgggctgaatcttcagatgaggggaggtgtagcacactcctgtgctctgctgactaaggcagggacacatgtcaccccatcggaatgagtgtcagaccaatggctaaaataaaatcattttcaatattcaaaggaatcaccttcattcatctacaaatacttttccttttctttcttttttttttttttttttgagatggagttttgctctgtcgcctaggctggagtgcagtggcatgatcttggctcaccgcaacttccgcctcctgggttcaagtgattctcctgccttagcctctggagtagctgggactacaggcgcccaccaccacatctggctaatttttgtatttttcatagagacaaggtttcactatattagcaaggctggtattgagttcctgaccttgtgatccgcccgccttggcctcctaaagtgctgggattacaggtgtgagccaccgcacctggcccaagtttttttctataaaaccacatattgcactcaaggtagggtaaatgatgcatcatgcctgctggcaacatgggccctatctggaaagcgagtgcccaccaccatggcacagtgctgtgcagtgcctgtgtggtgctgaatctcaggagcagcccccatcctgtgaaccacaactacagggaccttagacataagaaaaaatctctggtggccaggcctgccagcaagcagatgctaaccctgtcctgggggcctgcagggaggtcgggccagtggagaggtggcgagacccatgtctggtctccccaactcccacacatgctatgcaatgggcggatgaccacatacccgatctgcctggaagggtcctggtgtgcccactgcctcgaagagttatgaggggtgctgcctctcacatctcaccggtatcgcatttgaaggacaaattatgtcttcccttccccaccctgtgggcctccgtttcctcatgtgcaagtgggggatgatatgcttacatggttttgcagtgggggtatcgatgggatccatctgtcaatgccttgcatccagtgaccacctggagcacacctgcagttcgcaagttaggcttcctgctgcagtgaggggagcaagcactgcctggagccagggagcttctctgaaggaggtgttggaaaggacctgttccagaatttgggcttgtattgggagcttgggggagggttgaaataagcctttgctccagattggatgctgtcagaggcagggtggattctatcacctggcatcttccccaatcttacctagaaggaaggaagacaaaaacaaagctaacgctgcaattgacaaagaggtagtggtgaagacatagacacaggggagggggtatgaggtcatttttgtccatattttgcatgagctgagccatgatagctaccaagtgaccttgctttgtcttgacccatcatggtcacagagcgaccttgtctgatgctgacaacctgtgcagttcaacaggagaacaccaacgtcttgccagcagtggctgctgtcctcctgaggcctcgctgctcctcctctggggcctactgctgaccgtgggaggtgtggagtgggaggggaatatgccatgggtttttttttttgcagagcaagggcaggggactctgatgccttcagctctggccatcctgagtgctgtgatctgcttcccctgcttcctacaccacccgcaatcccaccacgctgctgcagtcactgccaactcatagtgccttctaagggccccagtgtctctgggacacccctctcccctgggagggaagcaaggtgctcatgaaggtcccaggtggaggtgctgaaagagtgtggaggtgccttcttgagtgtcaaagtctgggattccagctttcagcttcaggctccaggtgtgtgtgccgaagtggaattttctgctctcattcgctctcctgtctggtcagaggaacttggggagtttcctctctaggggagggaaagggcctggagaggtggccttgccctgaactgggaaggggtgggcatgggaaagcaggggcctgggctctgcctactgcttgctgacagcttgggcacagcactgccctccctgggctcctgtctcctttctctgtatgattaggtggaggtggatgggattctgcttctactcccagtccttgggcaccatatcaggtactcacacacttacgaccccatctggtctttggaacagcactgggggatggatctgtcaatctcacgttgcaaatgtttgttctaaatcccacactctgaagtcagaaagacctgggttagccctcagccactgacggttgcttgctatgtgaccttggacaagtcactgcccttctctgagcctcaacacccacatttacacaggggaagaataatacctccctcttgggctgctgtgaagcagagctaatgcgtacattgcctcaggcacattgcaggtgctcaaagtgttggtctttccttccctttctaggtccccatttcatcatctacacagtagggagtaactctgtctggattataaataagacaataggtgaatgcactcagcaagcctgggggcagggatgcctagagaagcttcttgcaaaggtgaagaatgtgtgctctgagccccatgctgagaggcaggtgagaggacagcaagcccagcaactgaggcctacaaaatgcctcctgcagagagggaggaggagcagtgttctaaggcgggtgggaggcagcatccccagtacttgcaggaggagcaggactgttgtgcttgctcaggggggtggtaggttaggttcttaggtatctgctgggtatcagatgctgcacaagcatcgtctccttgaacttaatctttccatcatccctgagaggtgggcattacaggggcttagtgggattgaaacacaggtcccctgagcctgtgctttttctacaaggcaacttagttcacatgtaataataggacccaaaaatacaactgctatgctgtgctcacctgatttcataacatccttgtgacctgcgaggttggtgtactgtcatcattttatggatgaggaaactgaggctcagagagggtgaataatttgctcatccttccaaagaactaaagggaagagaagtgctatagctctggcgccttctattcctggtaggaagtgtgcagtacccaaggccattctgaccctagtgcaggcaggagaaaaggcacatcaacaaatccagcagcaagcttccactgagggcctccctgacctttccttgcactagtgctgtgggagaaacagccttgttccttcacctaacatggcttcttgccgcccccaggataaagctcagagtcctcaggtctgtgtttgagagtcttcatggtctggtcccacctgcatttccagccaaatcctccaccagggttcccagtgcagcagccctggccacctgtcccatcctaccatcctgacttggctcaagctgctccctctgtcccatggtcttcacacatagaacaaggagaagcttgatataggctaacctgaattttccatttgagagcattttcaccttctggaaacagacatttcacccaaaattccagattccctgcttctctgaaaataaatacatacatacatacatacatacatacatgcatatataaatctgctcttactctgcactattctgttttctgagacagagtttcactcttgttgcccaggctgtagtgcagtggtgtgatccccactcaccgcaacccctgccacccagtttcaagtaagtctcctgcctcagactcctgagtagctgggatacacaggcatgcaccaccatagccggctaattttcatgtatttttttttagtagagatggagtttcacgatgttggtcaggctggtctccaactcctgacctcaggtgatctaccggcctcggcctcccaaagtgctgggattacaggtgtcagtcacctcatttgtccagtctgcactattccttagtgtcagacaatttgagccaaacaatgtctttctcatttggacatgaccttcagggtctaatttttgtatttttagtatagaccagttttgttttttttttttgacagagtttcactcttgtccccaggccggacggtgcagtggcatgatctcagctcaatgcaacctccgcctcctgggttcaagtgattcttctgcctcaacctcccgagtagctgggattacaggtgcctgacacaacaacctgctaattttttgtatttttagtagaaacagggtttcaccatgttgggcagactggtctcgaactcctgaccttaggtgatccaccctcctcagcctcccaaagtgtggaattacaggcatgagccagagcctggcctcacctggctaattctttgtatatttgaagagacggggtttcactgtgttggccaggatggtcttgatctcctgacttcgtgatccgctggcctcggcctcccaaagaactgggatgagaggtgtgagccactgcaccggcctcagtgtagcttattatcaaagtatttacatagaaaaattaatcaaagggcacaagcatttcaatacttaggttaagatgaaatctgtggccggaagagtgccagacacacatgaaatgttttgtgcatgaaggaaccacaacttaaaatgattttctgttattcattttggtatgttattttggaaatgtgattaatcacgtatgtaaaggacgttgagaagaatttccagatactctgatatgcatgacatcttaatcacacaatataaagcaaggctatcttaggaaattaggtatcactgccaaggacctttacatgagaagataaataaaaactactattaaatttgtaacagtcagatgggctggcaggcaagttgcgtcatttttttctcagtattttttctttttccttgattcaataaaacaaacttaaacgccagttatctgcagaaccctcactggactatgtttaatgatatgtgaaacacagcctgcacactcacagatccttgccacgtcccgttcccatcctctcaaaacctgtgttaccctgtggctagatttctcaaggagatgaaagagagagatgaatgagaaccaccttctttcaggtcgctctgcactgctcctgcaggtagacaatgacctctccggtgaagctattatccttggcttgggggtggaggcctttatcctggaaaagaggcctctcagggtggggaggtgatttaaattcttatgagagagacgcagctcctcacctcatctggaccttcacaaacctaaactggaaccgccagaaaaatgactgacaacgggccacacaagccaggcagagacgcggggagaggctgaccacaagaaaggcggacatagaagataccgtcctctggcgcacagggcacatatgtcccaacacacacacacatgcacacagggacacagagcaaaagagtgagaaaggggagagagagaaacaagagagagacatacgcacacacacaaacgcacaaagacatacagcagtggcacggtaacacctacacgcaggcagcccctgaattttcagggttctgctctccatgacaacaacccactggtgagagagcagcccacgggcacacaagcaaacctctccttttttgaagagactcactggcacaccgtccgtgcaggcctgaacctgggatcctgcgctgcttgcccggccctccacctgcagtttcttcctcctggacgaccctccgtgaatcccggcctccagagactatcctgttgatgccctggccaggactggtcttagcccggactctgactaatccctctagtaccaggtactcgggaggtggaggcaagagaatcacttgaacctgggcggcagagtttgcagtcagctgagatcccgccactgcactccactgagtgacagagtgagattccgactataaaaaaaaaaaaagaaagaaagaaaagaaaaatgaccgcggagcggtggctgcggggactggtgctgcggcgggtgaagtgaagattgggaaaggggcctcgtcgaccctccccgaatccgggcctgaggctgggatctcgcgctgccgccccggcgatccgcctgaggtttctaccttctgaggtttcttccttctgaggtttcttcctggtggtcaaccctccgagaatcccaggctctggagacgatcctgttaatgccttggccaggactgctctcagacccaactctgacgcactatcacacggggctcctacttcgcaaagtctcggggacccatccacgggcaacagtggcaatcactacgaccaaagcggaggctcaggccttgcgcatgcgcactggcgagactgaatccccgcttgctcccgagagtccggcggcagatcctttaaaaaatggcggcgacgcgcggctgaggggactggggcagcggtggcagcagcagcgcagtccgaggcggcgggtgggaagaggactacgagagggtcctgcgggagacccaagggttgtacccatagaggtcctgtcatcaggaccttcttgatcggtcttctgctttggttgccggtggaggaggagcttcagggtgtggctgggctctctggaatcctcttcgacctgactatggatcccactgggtgatcaggaatggggttacaatgcagtgaggcgggaagggtctcgctggggcacagaaagatcctaagggctgcaaggcgaactgtcagctgaaaatgcactgacccatgagcccactgcctccctccttcctaggtggagcagtggcctgacttcatctccaaggttcggggctctggcatcccgacactgctttccgcagcatgtgcaaggagagacagaggtgagtccgagatggagccaatgtgaccacacgtggcactaatgttccccaagagcagatggagtcagtgtgtgtctttgaggccatatggggcgatgctgagacggatagtgatgtccaggtgtgtgcaggtgggtcactgggacctcccacacaaagccaaggaaaagccaagcacactagaaaacctgtgagacagggcctgtgcctgagtccaagccacattcagggatgactgccagaggggccaagaggtttcgacaaacgacaccacaccgacatcctgccacctgtaggtacccctgatgccacctcctctgcacccagcaaaacccagtccctttggctccctgacatccgtggcagccaaaagattcagtgcttggaggcactttccccaggagcagaggaacgggatggccctcaggaatgagagaggaagggcaggtgggatgcaacactaacttttctagaaggcaaaggtcagccacagtggggttgcctcccgctcttccttgatggaccacgaagccatcacttgggacatgcagacaaagggagctttcctgtccaagacaggtatggaagcccagaactccaggatcatgacaacctatcatccagaaacaggtttggggagggaagcaatcataaaagggagcccagcgaaatttctccctaatggactgggaagtgttctttgttgaagacattgagccagactaagaaacctctaggcttcacaggaactgggcagacagaacaagagggaggacagagcagaggccaatgccacagcacaatgccactatcacgggcatccgggaaaatgtgccaaatgggtgacttggcgaggaaggccagcgtttgagtgacagacatgcttgccccatcttgtagccagcttccttctccgtcccagtgtatagctgtgggtagctttctcaatgagggcaaagggtgagaggagtgagaaccatcttcttgaaggtctgtgggcacacgcctgtgggtggacaatgagcacctgtgaggcctttgtccttggctggtttgcagtcgtcttgatcctagcaaggagacagcacaggatgggaggggtattaaaactcctgcaagacagcggaggcattaagccccttcaccaaagcacagtcatggagaactcctgctatgccaaaattaagggactggatattaagacaacagtggaaatcactgtgatgagacaatcagctagagccacgtggaggcacactggctgggccgactaaagctccggtgctggacggcaggcagctgcccctttcaacaatggctactgtgcggtagcagatgggctcctgttgcagcctcggcagcgactggatccggggtaaagtttgcagcggcccggtagagggtgtggccagtgtcctgtcccagggtgaaacccccaggagtcctgtcctcaggacttccttgagccaattctcaccaagggagggagagcttcaggacacctgctgggttctcgggactccccttcagatccgattttggcccccgccgagtgagataggatgggctcaccacatctggtgaggcaggcagcgcctcgctgcagcacagaatgatcccataggtctcaagacctagtgtcagctgcaaattcactgatccctcagccctctgcctccctcctcctttgaaagagcagtggcctgccccgcttctaaaagccctggggctccggaaagccaaccgccctttacaggacacctacaaacaggaacaagggcgaatccgaggtggagacaatgtgaccatgcatggcactggcgtatcccacagaagatggtgtgaatgtgtgtcaccggaggcatacggggcgacgcgaaacaaacggtgttctccatgcatgtgccgggggaagaggggaacgagtggcctttccctcaatgccaaggaaaattgaagaacacctgggaaccggggggtgggggggggcctgtgcctgacccaagccacgttttcaaatgcctaccagaggagcaaagaggtttctgcaaaattcgccccacctccaaccctacaccgccctggtatccctgacacaacttaggctgcccccagccccaaccccagcccctgccccagcccagtccctttggttccctgacattcgtttcggccagaagatcaagggagtcagttcacccaggagcagaggagaggatgtccctcaaaaatgagacaggaagtgcagaggaaatgcgacaccacctgtcctggaagacaaggccagtcactgtcgcctagcgctccttctaggcaatccacccacccatgagggaaaacgtggagaagaaggaagcttccctgcctgagacacatatggaagccaagagctccagggtcatgagacctgcggaatccaggagaaacacgtttggagagagaaacattcaggacacggatctccaggaaatgtcaccctgacggactgggaagtcatctttgttgaagacatttggccagagcgagatgcatccaggtccctgagaaacaggggaggcagagcaagagggaagacagagcagaggccggagcccaggcagggtaaagcaccgtgccaccgccacggtcataaggggaggggttccaaagggatggcttgtccagagaggccagcgttccagtgacagggactgttgccatctcccattcccggcttcctcttgcagaccgtatggtggtgtggcttcatttctcagaaaagagccgtgaaaagataccagcatcttctctgacgtgggtccgctgctctcctgcaggacaaagagcccctgtggggctcttgtcttcagctgcagtgtgttcatcttgatcctaggaaactggccgctcaggatgggaatgagatttcatttgctccgtgaccaacgcatctcctcaagtgggccaggccttcacatacccaaagcggatccgcggcggcgaaaaagattgacaaccggactcatgacccaggcagagacgcagaaagagggtcaccaaagacaggccgccctgcgagaaaccgctttgtggcgcacagggcacattcggcaaagacacacacgcacacgggcaaacacacacaaaacactgagagagggaaagaaacacacagacactgagagatagagaagagagaatgggagacacacacatagacacacacactcacacacacacacacacacagacacagagacacacacagagtcctagagcagaggcattgaaacacacacccccaggcaacacctgaggcttcggggttgtgctctcgacgagaacgatcctcgggtgagagaccaccccatgggcacgcaggcctacatgtcctcgagatcacggcggcactacttttggagagactcaccccaaccaacaccgtccgggcaggcctgaggctgggatgccgtgctgctttccccggactctgcctaaggtttcgccatcctggtcagccctttgcgaatcctggcatctggggacgttcccgtcgaccacgtggagaggtcaggccggagactcagagccccgacactcaagcactgccatggagggctcctactttgccatgcctcgaggactgctttctaagacaaccgtgggaaccactgtgacgggagaagccgctcccgcctcgcgcatgcgcattggctggcccgactcgaactctgctcctggcagtcaggctgggtcccctttaaagaacgccaccgcagcgcggcggcagcgaggctccagctgcaggcgcggcggcggctggatccggcctccagtttggggcagcgtgggagaggggaccgcgggtgtcttgtcctgtcccagggccaaacccccaggagtcctgtcctcaggaactccttgagctgacttccaccgagggagggagggggagcttcaggacgcctgctgtgttctcaggacaccccttcagatcccattttggcccccaccgagtgagataggatgggctcgccacatctgctgaggcaggcagggcctcgctgcagcaaagaatgatcccataggtctcgaggcctagtgtcagctgcaaattcactgatccttcaaccctctgcctccctcctcctttgaaagagcagtggcctacccctcttctaaaagccctggggctccggaaagccgaccgcgctttacagggctcgtgcaaacaggaacagtggcgaatgccaggtgcagaccatgtgaccacgcgtggcactggcgtatcccacagcagatggtgtgaatgtgtgtcaccggaggcatacggggcgacggcgaaacaaatggtggtgtccaggcatgtgccggcggaagtggggaacgagtgacctttccatcaatgccaaggaaaatctaagaacacctgggacccggggggtgggggcgcctgtgcctgacccaagccacgttttcaaatgcctagcagaggagcaaagaggtttctgcaaaattcgccccacccccaaacctccaccgccctggtagccctgaagcaacttcggctgcacccagccccagccccagccacagccccacccatgagaggaaacctggagaagaaggaagcttccctgcctgagacatgtatggacacccagagctccagggtcattagacctgcggaatccagctgaaacacgtttggagagagaaacaatcataacatggatctccaggtagtgtctccctgacggactgggaagtcatctttgttgaagaaatttggccagagcgagagccatctaggcctctgagaaacaggggaggcacagcgagtgtgacaacagagtagaggctgtagcccaggcagggtacagcaccgtgccaccgcaatgggcataaggggcggggttccaaaagggtggcttgtccagagaggccagcgttccaatgacagcgattgttgccatctcccattcccagcttcctcttgcagactgtattgtggtgtggcttcatttctcagacaaaagccgtgaaaagatacaagcatcttctctcacctgggtcagctgctgtcctgtgggaaaaagagctcctgtgaggctcttgtcctcggttgctgtgttttcatcttgatgctagaaaagaggccactcaggattgggatgagatttcaattgctccgggaccgtcgcatctcctcacgtgggccaggtcttcacacacccaaagcggttccgcgacagtgaaaacaatttacaaccagcctcataacccaggcagagacccagaaagaggctcaccaaagacaggccgccatgcgagaaaccgctttgtggcgcacagggcacatttgtccaaagacacacaagcagacgggcacacacacacaaaccaatagagagagggaaagaaacacacagagactgagagacagagagagaagagatcatgggagacacacacacagacacacaccgacacacacacacacacacacacacacacacacagagtcctagagcagaagcattgaaacacacaaccccaggcaacccatgaggctgcgtggttctgctctcaaagaaagcgaccctcggttgacagagcagcccaggggcatgcaggccgacctgtcctcgagatcacggctgcggcacgacttttgaggagactcaccccaaccaacaccgtccaggcaagcctgaggctcggatgccgtgctgcttccccaggactctgcctggggtttcctcatctaggtctgccctttgcaactcctggcatccggagacattcccgtcgaccccgtggagaggtcagaccggagcctcagagcccggacacccaagctctgccgcggaaggctcccgctttgccaagcctcgaggacttgtttctaagacaaccgtgggaaccactgtaatgggagaagccgctcgcgcctcgcgcatgcgcattggctgggccgactcgcgcttccctcctggcagttaggctgcgtcccctttcaataacgccactgctccgtggtggcggcgaggctcctgctgctgccacggcggcggctggttcaggggtccagtttgtggcggcgtgggagaaggggccttgagtatcctgtcccagggccaaacccccaggagtccagtcttcaggacctccttgagccgacttccactgatggagggggagcttcaaggcgcctgctgggttctcaggaatcctcttcagatcttagtttggacccctcctggttagaaaggaagggctcagcacatctggtgaggcaggcagggcctcgctgctgcacagaatgatcccatggccctcaaggcgtggtgtcagctaaatgttcactgatcagtgagccctctgcctccctcctccgttgaaagagcagtggtgtgccccacttctaaaagccgtggggctcctgccagcagacaccgctttccaggacaggtgcaaacagggtcggtgagaatccgaggtggagacaatgcgatcacgcgtggcactggcgtatcccacagcagatggtgtgaatgtatgtcaccggaggcatatgttgcaatgatgaaaccaacattagtgtccacgcatgtgcctggtggaaaggcggatcaagtggcttttccctgaatgccaaggaaaatcaaagaacacctgcgaacaaggaggaggcctgtgcctcagtccaagccacattttgaaatgcctgccagaggagcaaggagttctctgcaacattcaccccaccccgaagcctccaccgcccaggtagccctgacgcaacctcccctgcacccagccgcaaccccatccccaggcccagccctgttcctttggtttcatgacattcgttacagaaaaaagattcagggagtcagtccacctacgagcagaggagaggatatccctcatttgtgagacaggacgtgcagaggtaatgggacaccatctgtcctagaagacaaggccagtcatgatcgcctagcactcattctagacaatccacccacccatgaggtgaaacaaggagactaaggaagcttctctgtctgagacacgtgtggaagccaagtgttccaggctcatcagacctgcccaatccagcagaaacaggtttggagagagaaggagtcatgacaaggatctacaggaagtgtctccctgatggactgggaagcgatcttcgtagaagttattcagccagaccaagaggcaactagtcccctcagaaacaggggagaccgggcaagagggaggacagagcagaggccagagcccaggcaggttacagaaccttgccactgccacgggcataaggggaggggtgcgaaacgcgtgacttgtccagagaggccagcattccagggacagggattgttgccgtctcccattcccggcttcctcttcagaattgtatggtggtgtggcttcattgctcagagaagagccgtgcaggggtacaaccatcttcttggaggtgggtcttctcctctcctgccggacaatgagctgctgtggggttttgtcctgggctggagtgtggtcctcttgatcctagaaaagaagccgctcaggatgcggatgagactttgattgctctgggaccgacgcgtctcctcaagtgatcaaggccttcacaaacccaaagtggaaccgccgtgaaaacgatggacaaccggccacaggacccaggcagagatgcagaaagaggctcaccaaagactggccaacatgcaaaaaattgcattttggcgaacagagcacattcgtccaaagacacacacgcacacgggcatacgcacacaaacacacacacacagaccgacagagagagggaaagaaacacacagagggtgagagacagagagagaagagagaatgggagacacacacacacacacagtcctacagcggtggcacagaaatacacactcccaggcaaaccctgaggctaatagtggaaaatatgtatctaagaatacatttggaacagaaatgtgaaaaaccaaaagtaagagatattatgaaggatcaaatataaaatgacccagtgctaaagaggcaacaaagaaaattgtagaagaaaatgacaagaggaattgtgccttaatgagtttgtactactatatagaaaatacactaggctgggtaatttctgaagaacagaaatgtatttctcacagttccataggctagaagtccaagatcaaggtgccagcaggattggtgtctggtgagggtctggtctctgcatccaagatggtatcttgtgcactgtgtcttcaggaggagatgcactgtgtcctcacatggcagaaggtggaagggcaaaacaggggaagcccactccatccagtccttgtgtaaggatcctaaactcattcgtgaacactctcccttcatgactgaatcactaccttaaagccctacttcctaatcttatgacattggtgattaattttagggggacacattcagagcataacaccctatattcaatttcttaaaaattattttgttgttttgcttttctgtttttcaaatggcttaaagtgcacaaaactggattactcataatccttggctcatagcataccttggctcctatttcatccttgtctgtgcctgggcctctgtgtaaatgtatttgaataatatggtaatcacttgtgaacttacaacacaaccaaagaaccagggttctgaccctaacatctgctcctcctctgtcctttttcctgattttcacccttcagcccgagggtaactactaccctgaatttatgtttaggattctcttcctttaaaaaaaaaacattgtttatttcatacatatgattaccttaaatgatatattatttagtttttaagggtataatttatttacccattatcctattaatttacccattctcctattaatgaaaatctggcttgtttccatatattcgctattatgaatggaattacatgagcgtttttttttttttactacctctggtacatatgggcaagagtttctccagggcctatggtagaggaattactttgccataacatatgagaatgctcaaacttataagataatccaaattgctttccaaagtggttgttctaatttaaactctcacctcctgtattagtttgagatgatcttgttgatccacagtctctccatatttggtgatatggtttggctgtgaccacacccaaatctcagcttgaattctatctcccagaattcccacatgttatgggagggacccagggtgaggtaattgaatcacggaggccagtcttccctgtgctattctcatgatagtgaataagtctcatgagatatgatgggtttatcaggagtttctgctttggcttcctcctcattttctcttgcttctgccatataagaagtgcctttcacctcctgccatgattctgaggcccccctcaccatttgggactgtaaatccaattacagttctttttctttacacctctttttcttctcagacttgagtatgtctttatcagcagggtgaaagcagactaatacagtaaattgataccagtggagtgaggtgctccttaaaaaagtacccaaaaatgtgcaagcaactttgaaacttggtaacaggcagaggttggaacagtttggagggctcagtagaacactggaaaatgtgggaaactttggaacctcctagagacttgctgaatgactttgacaaaaatgctgatagtgttttgaacaataaggtccaggctgaggtggtctcagatggagatgaggaacttgttgtgaactggagcaaaggtaactctcgttatgttttagcaaagagaatggcagcattttgcctctgtcctagagatttgtggaactttgaacttgagagtgataatttagggtatctgctggaagaaatttctaagcaataaagcattcaagaggtgactcgggtgatgttaaaggccttcggttttataaaggaagcagagcatacagttttggaaaatttgcagcctgacaatgtgatagagaagaaaatcccattttctgaggataaattcaaggtgtctgcagaaatttgcataagtaacaagaagctgaatgttaatcccaaaaacaatggggaaaatgtctacaggacatgtcataggtcatcacagcagcccctcccatcacaagcccggggcctaggaggataaaatggatttctgggctgggccaggttcactgtgctgtgtgtagcctagggccttgtttctctgcgtttcagcccctccagccatggctgaaaggggccaacatagaactcaggccatggccttgagagtgcaaacaccaagccttggcagcttccacgttgtgttcagcctgcacatgcatagaagtcaagaattgaggtttggaaacctccacctagatttcagaggatgtttgaaaacatctggatatccaagcagaagtttgctgcaggggtggtgctctgatggagaacctctgctagggctctgcagaagagaaatgtggggtcagagcctctctacagagtccttactggggaacttcctagtggagctgtgaggagagggccactctcctccagaccccagaatggtagattcactgacagcttgcaccatgagcctggaaaagctatggacactcaacatcagtccatgaaaacagccacgaggtggactataccctacaaagccacaggggcagaactacacaaggctgtgggagcccacctcttgtatcagcatgaccatgatgtgaaacagggagtcaaaggagatcattttggagctttaaaatttgattaccttgctggattttggacttgcatggggcctgtaaccccttttttttggccaattactcccatttggaacagctgtatttactcaattacctgtaccccgattgtatctaggaagtaactagcttgatttggattttacagggtcataggcagaagagacttgccttgtctcagatgagactttggacaggggacatttgggttaatgctgaaatgagttaagactttgggggactgttgggaaggcatgatcggatttgaagtgtgaggacatgagatttggaggggccaggagcagaataatatggtttgactatgtccctacccacatctcaacttgaattgtactgctcaggattcccatgtgttcggggagggaatcagggggaggtagttgaatctttggggctggtctttcccatgctattcttgtgatagtgaataaatctcacaagatctgatgggttagtggtttcgtcttttgcttcttttgcctccttctcatattctcttgccactgccatgtaagaagtgctgttcatccaccgccataactctgaggcctcctcagctatgtggaacccttaatccatttaagcctctttttcttccctgtctcgggtatgtctttatcagcagtgtgaatatggactaatacatttggtattgtcaaacttcttaatatttgtggagagaataggtgtgtagtatcttgtgcatttccctgattactaatgaggttgagaaaatttttatgttttgcaagctttctcttttgtgaaatccctattaatgtcttttcccaattttctgttgggttgctatttttaaaattaattcataggagctccttatgcttagttgatatgatattaatctttcataggttttaggtactgcaaatatcttctctaatttatagtttatcttttgacttttttacttttattttttaatttcaatttttttgtttttgagacagagtctggctctgtcattcaggctggagtgcagtggctcactgcaacctccacctcctgggttgagatgattctcatgcctcagcttcccaagtagcttggactacaggtgtctgccactgatgcccagctaatttcttgtatttttagtagagatggggtttcaccatgttggccagcctgctctcaaactcctgacctcaggtgatatactattgggattacaggattgagacactgtgaccagcctatctttccactttttgatgtaaaaagttcttaattttgtgatagtcaaaatgtctaatcttttttaatggttaaatggctttttgtgtcccattcacttacattttctactaaaagttttaaagttttgtttctgacatgtaagtctttggtcctctggaatttaatgtttgtatatagagtgaagtaggaatataatttcattttgtttcttatatcaataaccattatttttctattctatttattgaaaagtcctttctttccttactgatctgccatgtcacctacatcacgtatcgaagattaaatttgtagagatttgcttgggagctctctattctgtttcattagtcagtttatcagtgaggaccacactgtcttaattgctgtagctttataaaagttctgatatttggcaggacaaatctttcctcttcttcaatgtctttgatattcttggaccttctcttttccatatatatatatctagagagagagagagagagagaggtctcactttgttgcccaggcttgaggacagtggtgcaatcacagtttacttcacacttgaactcctggactcaagagctcctcctacctcagccttccaagtaactgggactctaaggcatgcaccaccacatccagctaattttttaaaaaaatattattttttgcaatgatggagatcttgctatgctgcccaggctggtctcaaacttttggcctcaagcaatcctcccccctcaggttcccatagtgctgggatcacaagagtgagccaccacacctggctccattttccatattttaagaccatttttaaaaagttgctcaagactgcttttttctcttggtgttacttgcaacccccttacttagccttggaaatactgttagtgaagaaaatctaaagactcaaaaaaataaaatattctttcttttcttccaactgcaaaagagcagacaccctcctgtatcataaagctagttttgataaataattggtgaactgagagcatacacagtattattaattctgttctaatttctgcttcactgtggagtgtcttcacagagtcttaaaagattattgctatgaaatattcttatacatgtaacccataacctctacaattctgcagttgtacttggctgtcttatccaatactcagttgttttgcttcctaatttttaaattggcatctctaagttccaaaaggcataaatactagtatagatttttagttaagccagaagaaagtagactttatttactaacatatcttatatgtaaaagtttaataaatctccctgcttcttttcttttgcatcataacagccactgaaaataatctttctatagcagtttggggtaaatggacaatgacttttgtggccagaggtgaatggcccaggggctcctgcactccaggtcccactgagcctgccacacagctgagggcatcggtatttccacacacctatagtgcacgctgtcccagaacacagatccgatgctctcctttattcaaatggggagttgagagtactgtcgtagtaattaaattaataaatacatatttatacaccgttaaaatctggttggatttgtgtcccttcacaaaacaaattgcttaaatgaaaccacagagttaatataattgagttcatttgcttctacgagatgctcttttaaatggaattagaatctaatatgaaatgtcaattaaaagtttaaatattcaactcaattacatttagatttttgttctgttttgttttgagatggagtttagctcttgtcacccaggctggagtgcaatggcacaatctcagctcactgcaagcaccttctccttggttcaagcaattctcctgcctcagcctctggagtagctgggattacaagtgtctgccaccacgtctggctaagttttgtattttcagtagagatggggtttcaccatgttggtcaggctggtctcgaactcctgacctcaggggatccacccatcttggcctcccaaagtgctgggactataggcatgagccaccacactcagcctttttagattactttactttattttagttacttatttttatgactttattgttataaaaatgctaattttaaaaaatcaatcaatataacaaagaacatagaagatgatcaacaaacattcccacctctgttatctagaaataactgtcatgaatccaaaagctgacacatggcaaatcccttcacaccggttcacagtactaagtaactccttgcttgtagaaaacattattattatcattattatttttgagatggaatttgactcttgtagcccaggctggagtgcgatggtgtgatctcggctcactgcaatgtctgcctcccatgttcaaaggattctcctgcctcagcctcccaagcagctgggattactggcacacaccacgatggcctgctaattttttgtatttttgtagagacgtggattcaccatgttggccaggctggtttcgaactcctgacctcaggtgatccacttgcctcgaccttcaaaagtgttgggtttacaggcaggagccaccacacccagactagaaaacattatccaacagcaaacagtagcagtatgcttgggggttttaggattgattattttcaaatctctagaaaagctcaatgcattgctttaggctataatctcagggcagagtctcatctgttaatggggggatggtctaagggtccttccagctctcagattaatggtttcccatgttgaactgctccctgtcacccacccatcctcggttttgtttgtttgtttttacagagatgaggtctcactatactgcccaggctggtcttgaactcctggccttaagcgatcctcctgccttgacttcccaaagtgctggagttacagatgtgagcctctgtgctcagcccatccttgcctgttcaagtgtagaggtaagtagcagatgccaagtttacctccatgtcagaaggggcagatgccccagggcagaatcataacgctaatcaggcctcccactgcatgaagacattatgttctgaagcttaaacctggacaaaggtctgaccagtagcactgtgttcatgattatcaggtcaaaaatttaatactgggactacccagaagaacctggtagattcaggtgcagtccacagtccaatggtcagccatgataacaggccacctgtactttctctttatcttggagtccttgatgtaaaaattgatgacatattcttctggtgtgcttccctttcttcttcattttccataagtaatttcctccatcccgactcccaacaggccacagtcaattcaggacattttaaccatgaaaaggagtctccataacacgaatttagaggccagacacggtggatcacacctgtaatcccagcactctgtgaggctgaagtgggagaatggcttgagcttaggagcttgagaccagcctgggcaacatggtgaaaccctgtctctaacaaaaaataaataaataaataaataaataaataaatgaaaataagccatgtatggtggtgcatgctactagtcccagctactcaggaggctgaggtgggaggattgtggagccaaggaggtcaagtatggagtggtccaagatcatgccactgcaatccagcctgggtaatggagtgagactttatataaaataaaaaaaggatttaaaggacaggctgactttcttgttacaagccaatgcacatttgctattccataaatcctagggcacctcttaagaattaatccagcatataaacagaaccaaaaacaaaaaccatatgattatctcaatagatgcagaaaaggcctttgaaaaaattcaacaactattcatgcaaaaaactctcaataaattaggtattgaatggacatatctcaaaataataagagctatctatgacaaacccacagccaatatcatactgaattggcaaagactggaagcattccctttgaaaactggcacaagacagtgatgtcctctctcaccactcctattcaacaaagtgttggaagttctggccagggcaattaggaaggagaaggaaataaagggtattcaattaggaaaagaggaagtcaaattgtccctgtttgcagatgacaagattgtgtatctagaaaaccccatagtctcagcccaaaacctccttaagctgataagcaacttcagcaaactctcaggatacaaaatcaatgtacaaaaatcacaagcattcttatacaccaataacagacaaacagagagccaaatcatgagtgaactcccattcacaattgcttcaaagagaagcaaatacctaggaatccaacttacaagggacgtgaaggcatttggttcttcaatgagagctacaaaccactgctcaatgaaataaaagatgatacaaacaaatggaagaacattccatgctcatgggtaggaagaatcaatattgtgaaaagggccatactgcccaaggtaatttacagactcaatgccatccccatcaagctaccaatgactttcttcacagaattggaaaaaacaactttaaagtttatatggaaccaaaaaggagcccgcatcaccaagtcaatcctaagccaaaagaacaaagcgggaggcatcatgctaacctgacttcaaactatactacaaggctacagtaaccaaaacagcatggtacttgtaccaaaacagatatagatcaatggaacagaacagagccctcagaaatatcgccgcgtatctacaactatctgatctttgaggaaaacaagcaatggggaaaggattccctatttaacaaatggtgctgggaaagctggctagccatatgtagaaggctgaaactggatcccttccttacaccttatacaaaaattaattaaagatggattaaagacttaaatgttagacctaaaaccataaaaactctagaagaaaacctaggctttacaattcaggacataggcatgggaaaggacttcatgtctaaaataccaaaagcaatggcaacaaaagcaaaaattgacaaatgggatctaattaaactaaagggcttctgcacagcaaaagaaaataccatcagagtgaacaggcaacctacaaaatgggagaaaatttttgcaacctactcatctgactaagggctaacatccagaatctacaatgaactcaaacaaatttacaagaaaaaaacaaacaaccccatcaaaaagtgggcaaaggacatgaacagacacttctcaaaagaagacatttatgcagccaaaaaacacatgaaaaaatgctcatcatcactggccatcagagaaatgcaaatcaaaaccacaatgagataccatctcacaccagttagaagggcgatcattaaaaagtcaggaaacagcaggtgctggagaggatgtggaggaataggaacacttttacactatgatgggactgtaaacctgttcaaccattgtggaagacactgtagccattcctcaaggatctagaactagaaataccatttgacccagccatcccattactgggtatatacccaaaggactataaatcatgctgctataaagacacatgcacacgtatgtttattgtggcactattcacaatagcaaagacttggaaccaacccaaatgtccaaaaatgatagactggattaagaaaatgtggcacatatacaccatggaatactatgcagccataaaaaatgatgagttcatgtcctttgtagggacatggatgaaattggaaatcatcattctcagtaaactatagcaagaacaaaataccaaacaccgcatattctcactcatacttgggaattgaacaaagagaacacatggacacaggaaggggaacatcacactctggggactgttgtggggtggggagaggggtgagggatacctttaggagatatacctaatactaaatgacgagttaatgggtgcagcacaccagcatggcacatgtatacatatgtaactaacctgcacattgtgcacatgtaccctaaaacttaaagtataataataataaaagaaaaaataaaaaagaattatgctaaatctactctacccatgctgtataaatggaacaacaacacttggatgatatcagagctgtttacggcatgggttactgagtattttaatcccacttttgagacctacagctcagaaaaaaagattcatttcaaatacttcagctttttgacaatgtacctggtgactaaagagctctaatggagatgtacagggaaacgcatgctggtttcatgcctgccaacacaacatctattctgtagtccatggactgaggcatcattttgactttctagtcttattatttgagaaatatattttataaggctgttactgccataggtcatgattcctttgatggatctgggcaaagtcaattggaaaccttctggaaaggattcactatgacagatgccactaagaacattcaagattcaccagaggaggtaaaaatagcagcattaataggagtttggaagaagttgattccaaccctcatagatgactttgagaggttcaagaccttagcagaggaagcaaccacagttgtggtgaagatagcaagagaactagaattacaagtggaacctgaagacgtgagtgaattgctgcaatctttttttttttttttttttttttttgagatggagttttgttttgttgccaaggctggagtgcaatggcgcgatctcggctcaccacaacctccgcctactgggttcaagtgattctcctgcctcagcctcctgagtagctgccattataggcatgtgctaccgcatccggccgattttgtatttttagtagacacgatgtttcaccacgttggttagggtggactggtactcccaaccgcagatgatccttccacctcggccttccaaagtgccgggattacaggcatgaaccaccgcgcccggccaaattgctgcaatcttaatggaaataaatggaattagatggaaaaaagtttagcctggggctcaggatcggctctccctttactaccacattcccgtgcagagcaccaaggaatcagagaattctaaactcaacttcgaccttgtgggttattatgacagtatatttatcaaagtaggagaatagaacatatttaactatttgttagcttcatttataactcataattatttagacatactgcaaatgtgggctggaattcacgttctgactttttgtggccttgagctaaggaaaacggacccagggaaatgggctttatatgcttggatggcttcatggaatccccaacttctttagcttctgtgacagctcaagattgttactaaaatccactttgtattatctttaaaaaccaagggatatcatttttgcttatataataattataaagttagttgatagaggagtggcagggttagagaggattggttccaattttgatataaattctactgtgggtaaaatgctaccaaactgcatagcatgctacagtgaaatcttttgtgaaaggaagagtcagtcaatgaagtaaacttcattgtcatcttcttttaagaaatttgtcactccctctccagccctcagcaaccaccacccggatcagtcagtagctatcaacattgagacaaaaccatccagcagcaaaatggtgatgacttgctgaaggcctagatgatggttagcattttttggcaatcacgtattttcaaagtaaggtatatacattatattttagacataatgctattgcacacttaattgattacagtagcttaaacataacttctttttttgagatggcatctggctctgttgcccaggttggagtgcagtggtgcgatcttggcttactgcaaactctgcctcccaggttcaaacaattctcctgcctcagcctcctgagtagctgggactacaggagtgcaccaccatttttgtatttccggtagacacagggtttcaccatgttggccaggctggtctcgaaattctgacctcaggtgatgcacccgcctcggcctcccaatgtgctgtgattacaggcgtgagccaccatgcctggcaacataacttttatatacaccagaaagcaaaacatttcgtgtgacttgcaaaaagtttcgtgtgacttgcgctgttgtgatattccccttattgtggttacctagaaccaaacctgcaatatctccaaggtgtgcctgtatccctagaagcagagctggagtaaggacttgggtgtgggtggtttatttgggaagtgattccaagaagcaagagtcagaagtgggaagagtgagccaggaaagaaagaaaaaccaaaataatggcatgttattgaggctcctgccatggtgttttttcttcaggaccttccaagaggttccggaaagttatccagaactgttcacctgaaacatgagcctggagcatttgtccacctgtcccacactggttgaggtcttcccctgaggctgttaacttgcaagtgtttctgggctgtatttatgctcagacaaaatcctacaataatggagatgccctagggcagaaagtggagcttgagtttgctggcagcacaagggaagcctgcgcttcagtggaacttcccacggtggctgagactgaatgaaaggtgagctgagaagacatgacgcaggcgccattgcactaagcaatggtagccatcgatctgggcaagaggacccctgccctgaatcctgtacttgagaaggtgcctctctggccctccactgactgtaccctggcccacccagagcttcaccctctcttctagggcacacgctgggcactcaggcccctgatgaaatgtgcctgagcctgcatggcctcttccctaggttcatttcaaagcgcaaactgcttgtccaaatggtgcccccttgtgcaccagaggctttctgctgtctgaatggggtgagaattgtggatggagcttgcacggggcctagggagtcccccacacaggggtatgcaaagcttctcaagtgaggacagggctacctacgatgaaagaaaaaagtttagcctggggctgaggatcggctctccctttactaccacaatcctgtgcagagcaccaagaaatcagagaattctacactcgactttgaccttgtgggttattatgggtgtatatttatcaaagtaggagaatagaacatatttaactaattgttagcttcatttacaactcataattatgtagacataaggcaaatgtgggctggaattcaagttctgattttttgtggccttgagctaaggaaaagggaccccgggaaatgggctttatatgcttggatggattcgtggaatccccaacttcattagcttctgtgatgactcaagattgttactaaaatccactttgtaggaaatacggggaggaaggaaagagaaataggcctttttatttttattgatacatgacaattatacatatttctagggtacatgtgatattttgatacatgcatacaatgtgtagtcatcaaatcaggataatgtgcatatccatcaacttaaacatttatcatttatttgtgttgagaacattccacatctttcctctagtcattttgaaatatataagttattgttaatgatcatcaccctactgtgcttttgaacactagaaattctgttccttccatctaactgtatttttgtccccattaaccaacttctgggaagggcaaaagagtgggtggatgaaaagggccctttttaggaaaagtaaatcttatgagaagggaagacattttaggaggaaaaataaaaaggtggaccatgggcttagagtagggactgcagaaattgaatgacaaagagaaaaaaccaacttagcgatgtgaaaatacatctcaatgtcattcctttcacaggtcctatgtctgatattcttttgggaagctggatatgaagtcggaatctttctttgagtcaaacatttttatgattacgcttattatggaatgatagctgacaattattgagagcaattattggggacaattattgagctttcacaagctcttttcaaaggcctttacatatattttctacacgtctaattgtcagatattcttattattcccattttgtagatgagggatgcacaggcctaaaacctatgtggaggcagagagcagctaagtaacatgaccatggcccaacagcaaacaaatgatggggccacatgcaaatccaggcagaacccttctattatatgaagctcaatgttttcttgtttgcatcttgttatgaatacacctatttgcaaaggggttttgaagctactttaaaacattttgtggttgtgcatggtggctgacacatgtaatcccagcattttgggagaccaaggtggacagattgcttgagctcaggagtttgagaccagcctggccaatatggtgaaaccctgtgtctactaaaaatacaaaaaaattagctgggcgtgttggtgtgcacctgtaatcccagctaatctggaggctgaggcaggggaatcacttgaacccaggaaaggaaggttgcagtaagctgagatcatgccactgaactccagcctgagcaacagagtgagattctgtctccaaataaaaaataaataagattgaattttgagctcctgaccatgtccctagattgtactcatatgtattttgatgtctaatcaaatttattcttagtgcgctttttagggaaagtatttattgagcatctactgtatatcatgtgctgagataggcaccagtggtgcagggaacatatggcacagtctctgacctcaggtaactttcactctcatacatatgtattaggactccaatacatgtgtgaatataagatagtatgatagatattgcaacaagtaattatttactgtaaacctattttataggattttaaacttaaaatactttcaccctatttccaaaaaaagtattgcataagtttaaatggattctcagtttgaaatcatcatagaaactgcagtagcatctgctggtgaaatactgctttgtgtctattagaatagtccaaacaattgggagagaactgcattattagagctgtaaaagttactgtctagaaatctcagaaaagaggaggaagttctatggtagatgaataagatgatatctaaactgttctcttaaactactgaagttctgtggatatctcacagcacaaagttcaactgtatgcccacaactcctcatgctacaagatgtgacacctttccaatctctttttgcaaaagcttccaattatgtctcttttaagagtactttttatacccacatattccggattttgtagtacatgcaaagacaagatgggaaggggcttccatttgttgatgccagctgccctatggaccaggccctgcccatgcatccgtgttggttcttttatccccacatcagccatagcccataggcattaagtgtcattgcacagatgaggaaattgaaactctaagagaatatgcaatctacccagagtcatgcagcttgtgtatgtaagggttggaatgaaaatccaatctgtgtgagtcccaagtccccttccaccatatggtttccatttcattttgcaatcagcttggctgggatatgtctgccctaaaagatagtaagtaggaatacttgcctctataccttaacctgacatccatgggcttgctttttgtatttggaggtgtcataacattataataataatttgattttttttgaacagtgaatattatactactcagtctagagatttatgacatcccagtctaaactggatgataacaatgaacttcttcaaggagacaagtatgagtaataaggtagtaataagttgaatttttatggagttgctacttctgaattaaaactagttgaggttaagtagatattcaaaattattgctataatcttcacttgaataatacaaacatttattttttttacatatttatttatttatggaacagagaggtaattttaaaacagaatttttgcaaattgtattaaaatatattaaaaacataatacattatgacccagtagagtttttcaaagtaattcagtgttagttcaaaatgtgaaattcaatcagtataattcaccatagaatacagtgtgtatgtcagtataatatatatcaaaattggaaagaagtaaatgtatctttgttttgtaataagatgaaattaaaattttaatgaatttcaactttcattttagattctggagggtacctgtgcaggtttattacatggatgtattgtgtgatgctgagatttggggtacgaatgaagatgtgagtgcctgtcttgaacttgcacccagagcaatctcccctgatcagcagatggtaaactaatttgaattacacttgaatttcttagtagagcaggtcacaaagggcaaattgtggtccggagacaaaagtgcccaatggtctaaaatgagcctcccatatcactgagggtacaggtcttcagagaaatatatttcagaaaggggtcaaacccttgtttaaagataaatgtaagctgggtgtggaggcacacgtctataattccagctactcaggaggctgaggcaggaggattccttgagttcaggagtttaagaccagcctggacaacataggaagatcccatctcaatttttaaaaatgagaaaaaaaattgataaacttaagcacattaaaattttaaagagtttatttgagcaaacagagattcatggatcaggcagctccaaactgaaagtggttggaggatctactggaggtgtttgtaaggaaggcttttatagggtgaatatagaagtagggtagagaaattatttgattggcaaaaatttgggcagttgcattatttgaactatcctggtggtaggtctctcattacacagctaatactcagcgggccacttgttgatgggctaagcttgtttcattttttctatgtaggaaccctggccatgggagctatctcagcctaatgctctcccattacgttattttacaccttctttctgtatcagggtaagtgggggtcttccccaggagtgttcttaccaccctgtttccctcagcaaaatgaaactgtcccttttgcctctgtaggcaatcttctgaacaagacattcctaatattcttatcttactttatcttatcctcttctctgtaccttgtttacatgcttctggaacacttgtgtgtcttgcacttatctcctgaattatttaggcaatcctaaaagaagaccgctaggatggattggtagagaactgctggcatattgagccctctctctttgtatctggaactttcataattacgttagttctccatgccaattttgcacttatctttgttctccacttcaaaatacatttacctctgacagaagctgagtacataaaagggaccttgtccagtggtacttatgaggcaggagacatgatatagttaaaattataaactataatcactatatagttatatactacatataatcactatatcactcccgggttcaagtgatactcctgcctcagcctcctgagtagctgggattacagacgtgtgccaccacacttgaataattgtatatgttttaaaataagaatagattttctcagctaaactgaagggaaatgctaaagaaagagtgagatttgacttgataattatgtgtctgaatgaatcagccaattaataaaatgaaaacaggccgggacagtggtacatgccagtcctcccagcaatttgggaggccaaggtgggcagatcacttgagtccaagagtttgagaccagcctgagcaacatatcaaaacactgtctctacaaaaaatacaaaaattagccactgtgtggtggctcatgtctgtagtccctgctacttgggaggctgaggtaggaggatcacctgagcctggagatgtagaggctgcagtgagctgtgatcatgccaccgcacttccagcctgggtgacagtgagaccctgtcccaaagaaactaaactaaaattaaatgaaaacaaacacaagacaaaaattgatggacttgttttaacacatagcatgatgaacacacgtagataacaatactaacccaatgggttattgtcagtcaaactcatggtcactagtctaaaggaaatagaaataatgactgtaaattaacaaccatttacaacattagaaatacaaaatacaaattatcatcagatatatcagactcacaattatttgaccttttaagaattcatcctgctctccaaaatgaataagaaaatattgataactcttttttcccttaacttagcccttcatgctcctgaatctctgaatttgtgtttacatcttaacactctttttttgtaattattttctgcagcttttttctcttcacttgagacatctcctatattctctttacacttttccacaaatgactcaatttttttttgtaaacttcattaatgagttccatgtatgtgatgatagtgtaatgataaattatccatgtggtttccctccactcttgttcattattcaagtgactctcgatttaccaacaggctaggaggtacctatgacattttgttcaggttaagcagaaagaagaaaacaaaatctacattctcttttttatattttaaacacaagccaacaaataatttggaaggacccatgacagggaggattttatgctctttcaagagtaattgagattgtttaattgtacggaggaatgagcatatctcaaggggaagcaagaagatataatatttggatgacagaatcattaagaactggctttgcaccctggctacaccattgcacacaggaaatattagggtgcagtggtgcatgcctgtaatcccagcactttaggaggctgaggcaggtggatcacctgaggtcagctgttcaagaccagcctgacaaacatggtgaaaccccatctgtactaaatacaaaaaattagctgggtgtggtggcacatgcttctaatcccagctacttgggaggctgaggcaggagaatcacttgaacttgggaggcagaggttgcagtgagctgagatagtgccattgcactccagcctgggcaacaagagcaaaactctgtctcaaaaaaaaaaaaaaatatatatatatatattcactgccccaccaactttttcacataggatgattaaggattccagagcccatgctacctctaggggctcctacccctgccacaccacacatatatcttgccagggcctgttacagagaagaaaaggcccagtaaattaatatcacaatcattgccacatacccaccaaaagactcaaattaaaattttgacaaaattaagtgtcaagaagaatgcgaagatttgagaattatcacattgtaagactgtcagttggtgtgttaacattggaatgaaacgaataatacctagtaaaactgaagataagtttaccctgtaacctatggtttcacctcttgctttatactgtacataaatacacactaatggtaaccaaatagaaatacaaacatgttcacaacaacatcatttgtaactgacaaaagtgaacacaacctacatgtccaccaacaatgaagggatacacactggtgtactgtagttttatttatttttattttttatatttattttatatatataaatataaatttatatatattttttgagacagagtcttgcttagttgcccaggttggagtgcagtggtgcgatcttggctcactgcaatctccacctcctgggttcaaggaattctcctgtctcagcctccccagtagctgggattacaggcgcatgccgccactcccggtaaatttttttatttctagtagagatggggtttcaccttgttggtaaggccggtctcaaactcctgtcgtgaggtgatccacctatctcggattcccaaagtgctgggattacaggtggcaggcgctgcgcctgggctgttttttttttttttttttttgagactgtcactctattgccccagttggagtacagggtgagatcttggctcactgcaacctccaccacctcccaggttcaactgattctcctgccttagcctgtcaaataattgggattacaggcgcacaccaccacatctggctaattttttttttttttaacagagtctagttctgtcacccaggctggagtgcagtggtgcaaacttggctcactgcaacctctgcctcccagatacaagtgattctccagcctcagcctccagagtagctgagactacaggcatgtgccaccacacctggctaattttttgtatttttagaagagatgtggtttcactgtgttcgccaggattgtctctatctcctgacttaatgatccacctgccttggcctcccaaagtgctgagatgacagacattggccaccacgtggcctaatttttgtagttttaatagagatggagtttcatcatgttggctagggtggtctggaactcctgaactcaagtgatctgcctgcctcagcctcccaaagtgctgggattataggcacgagccatcatggctggctggtgtactgttttaatagaatgaagaaacaatgttaagtgtgaatcttaaatacttaatattgagtaaaaggggccagatgcaccaggatacagacttttactccaattatgtaagagaaaaaccaggcaaaatcagactttactttaggcatataaaaaatgcataataaggccaggcactgaggtcaggagttctaaaccagcctgacaaacatgcaaaaccccatctctactacaaacacaaaaattatccaggcatggtggcacatgggccatgcctgtaatcccagctacttggaaggttgagacatgagaatcacttgaatctgggaggcagaggttgccgtgagccaagatcatgccactatactccagcctgggtgacagagcgaggctctgtctccaaaaaaaaaaaaaaatgatataaaatacataataaaattataaagagaaccaaggagaggatggcagatatccacaggtaatgtggatatctcttatatctgttactaataaggggaaggaagactttaggatcagttaggtgcatacagaggacttctcggtggtgatagtcctctatttcttcacctggataggtatcacacagatgtttatttaataactgatgtatccatatctttgtttgtatattttaaaataagaatgaaatagaggaaaggaaggtgaatggaaagagatttctccattcatcaaaattttaaagtcatgtttttcctcaggttcttctccaagctcagtttgaaataatgaaaggagctaagcatggtggctcacgcctgtaatctcaggattttgagaggttgaggtggacggatcacctgcggtcaggagctaagaccagcctggccaacatggtaaagccccgtctctactaaaaatacaaaaattagctgggtgtggtggtgggcacctataattccagctactcaggaggctacagtgagctgagatcacatcacttgactcaaaagagtgaaacttgtctcaaaacaaaacaacagcaatgaaaaaggaaacaggaaaacatcctcaataatagaggacgtactaaacaaggatgcagccactcatatcatgtcttgatttgtagattaagaaaatgatgacccttcctaggtactgatttagagtgacatttctgtgaaagtagagaaatacttatatatccatagaacacatatatgtatttaaaattgtatatgagcatgacatatacatacatatttgtgtgtatggcatctgcatccttgtatgtttaaatacaatctggcaattgcattctttggtatttgaaaacttatatccactcaaatcctgcacatgaatgtttacagcagcttatacacaactgacaaagattggaagtaaccaagatatcctacaatagagaaatggataaactaattctgaaacattcatacaaaggaatattcttcaggaataaaaagaaatgaactaccaaagcatgaaaagacatggaggaatcttaaacatgtatttctaagtgaaagaagccaatacaaaaaggccacatagtatagatttccaactatatggaatactagaaaaggcaaaactaggcagatggtattataaaaagttcagtggttgccagaggcttgagcagagggaaagataaataggtggagcacagaagatttttagggcagtgaaacttttctgtgtgaccctataatggtggatatatgtccttatgcatttgtcgaagcccataaatggtagaacacagagagtgaatcttaatattagccatgaacttaataatatcaatattggctcatcaagcataacaaattaccacactaacaagatgataatagaggaagcgtgtgtactatggtgtgaggtgaatattagagctcaatatgccttctgctctatttttctgtacacctacaactgttctaaaaattgtcagttatttatttatttatttatttatttatttttatttattgagatggagtctcactctgtcacccaggctggagtgcaatggcccaatctcggctcatggcaacctccacctcccgggttcaagtgattctcctgcttcagcctcctgagtagttgggattacaggcaccagccaccatgcctggctaattttttgtatttttagttgagatggggtttcactgtgtcagccaggatggtcttgatctgctgacctcgtgatccacccgccttggccttccaaggtgcttggattacagacatgagccactgcgcctggccttatttatctttttgagacaggttttagctctgtcactcaggctggagtgcagtggtgcaatcatggctcaatgcagccccaaactccaggtctcaagtaaccctcccgcctcagcctcctgagtagccgggaccacaggcatgtgccaccatgcccagcacatttcatagacctctgaaaagatgctcaacaccatatgtcactagggtgaaacaacgatgtgataccattacacatctcttagactgccttgaatgcaaacaccaacaccaaatgctggtgaagatatggagcgacaggaactcatctctatttctgctgagaatgcaaagtgggacagccactgtggaaggcagttttgcaagttcctgccagactaaacatacgcttaccatacaatccagtgaaaaatgaaattttaaaaatatgttttatatacttgaaccatatacatttaaatacatatatattttatatatattttaaaagtatatatattgttattttttgtagagacagtctctacagaccatagcctgcagaatctattaattttaaaagcgttttaaactcttgaacaagaaattatttgaagagtgaaaaataaaatgatagagtattgattggtaaattccaaatgttgtatattacataatttggattaattttaaattccaaatagtgaaactttaaaaaatattttaaaaatttcctaatccgagatcaatcctagttcaacacattcaagagctgatttcagaggagagataattggtcaacaagttctttggttttgaccttgttttccgactatttgtgtttgtgaatggtgaatttttagattttgttcctttcttcttagggtattgactaatattttattaagccagagagacagtaaattagaattatcttgttataaatatttcctccaaattcacttatctaaagtttttggtttctttagtcgggtgcagtggctcacgcctgtaatctcagcacttttggaggctgaggtgggggtcacttgaggtcaggagttcaagatcagcctggccaacatgtcaaaaccccgtgcttactaccatacaaaaattagtagagtggctgggtgttttggctcactcctataatccttgcactttgggaagccaaggtgggcagatcacctgaggtcgggagtaaagaaacagagagtaaagaatttctgaaaccaaaaagtctgagaaaagctgctcaatatattcattcaacaaatatttgtctccttactgtgtacatggtacagttctaagctctagggataaatagcattgaacaaaattcacaatatctcctgctctcatcaagtttacattctagtggacataatataagaacagagatgatttgtcaaaaggcagtccgggcacagtggctcatgcctgtaatcccaacactttgggaggccaaggcagggagatcacttgaggtcaggggttcgagatcagcctagccaatatggtgaaaccctgtctccactaaaaatacaaaaattagccagggctgggtgtggtggctcacccctgtaatcccaacactttgggagtccgaggtggtttggatcacctgaggtaaggagttcaagaacagcctggccaacatggtgaaaccccgtctctactaaaatacaaaaaaaaaaaaaaaatgttagccaggcgtggtggcagatgactgtaatcccagctacttgggaggctaaggcaggagaatcacttgaacctttggggcggaggttgcagtgagccgagatcacaccgatgcactccagcctgggtgacagagcgagactccatctcaaaaaaaaaaaaagttttaagtgccatggaaaaaatagggaagtggtaaatagtttcaatttcagataggatgatctctgacaaggcaagaatcatgttaagacatgaagaaaattaagacaatgatccttacaggtatatggagggagagcttcttttttttccttttctgttttatttatttatttatttatttatttatttatttatttgacagagtttcactcctgttgcccaggctgcaatgcaatggcaccatctcaactcattgcaacctccacctcctgggttcaagtgattctcctgcctcagctactctcccaagtgaaaggtgaccaagagagccattgaaaatagtgagagtggccgagtgcggtcccagcactttgagaggctgagatgggtggatcatgaggtcaggcattgaagaccaacctggctgagagggtgaaaccccgtctctactaaaaatacaaaaattagcgaggtgtggtggcatgtccctgtaatcccagctactccagaggctgaggcagaagaatcacttgaatctgggaggtggaggttgcagtgagcccagatcatgccactgcactctagcctgggtgacagagcaatattctgcctcaaaaaaaaaaaaaagaaaagaaaagaaaaataaaatggtgagagcaccatgtttgaaaagtggtccaggcactggagtaaagggccagtgtcagccaagtcatcagctatcagaacaggaagccatcaggtaatatatcaagttgatatattgagaagaagcaggatctacctattatataatatagagacaagcactcagatatgtagattagaaatagtttagaaaatttaaacatttgattattcaggaagtagacctgggagcattggagaaacaggttgggggagtagactgcatggaaagctctttcttagtttgtaatttttcaattatgcacataggtttcttacataacatggaaaattcaattaaagaagaaacaacattgtgttctgaggtcccaaaggtttagtgattaattagaaagactcacaaaaccgagtgaagctgttatactcatagtttattacaacaaaaagatacagatgaaaatcagcagcagaaaaaggtgcatagggcagagtccaggagagacaaagcacaagcttccagttttcctctcccagtgacatcgtgtggacggtgcttaattcacccagcgatatgtggcaaaaagtatagaatatactccccaacaagaagcttacctgagccttggggttgagggttttactggaggttggtcacatggacaagagcacccatttggatggccttagtttctctgtctccacccttcccaaggtcaagctgacactgcatggtccaagttccccataataaatcacgttgttaactcccagataggcaggagattccaaggacttagaggttatttcctgggagctaggatagagtcaaacctttctttggagtatgccaggtttgggcaattcaggcctactaagtttcctcgactgcatacaagtgatagtatgtaggaaatgagtagtcacatatattgctggtgaaagtagagtgttatataaccctttggaaagaaatcaagtgtgtagcacatacacattatatttggtttgtttttgtttttgtctgagacagggtctcactctgtcacccacactcagatgcagtggcatgatcacagctcactgcagcctcgactacccaggttccagctatcctcccactcagtctcctgagtacctgggaccacaggcacctgcaagtacacccagctaatttttgcgttttttgtgcagatagtgtttcaccatgttgcccaggctgatttcaaactcctgggttcaaacaatcccctacctcagctccccattgtgctaggattacaggagtgagccactgcacccaacctatatttgtatatacattaaattgtatatgttaggctgggcacggaggctcacgcctgtaattccagcattttgggaggccaaggtgggcggatcacttgaggtcaggagtttgagagcagcctggccaacatggtgaaaacccatctccactaaaaaagcaaagttagctggacatggtggcagatgcctgtattcccagctactcaggaggctgaggcaggagaattacttgaaccaagcagcggaagttgcagtcagccgagatcatgccaccgcactccagcctggatgagagagcaaaactccatctcaaaaaacaaaacaaaaaagttgtatatgttattgtatgttgtgtatatattaagttgcatatacacatattaaatatatacacatatattacactttatacacatacacttgtttcctcatgcaatttgtttcagcagaagtaaaaataaagatataagtaaaagaatatttatagaagcactatttttggtggcaagagtactttaatatcttaaatgctcatataatgaaagatactttaactcttacaaagaacgagttagctttttatctactataaagatatcctaatatctttatatctaaagtgacatatgtggccaattgttatattaaaaaaggagaatgctttataattaaagaaaaaagaaagaaacgttacatagtagccctcccttatctgcaggagatgtgttctaagaccctcagtggatgcctgaaacttgggtagcattgacccaattgctgtcaatcagaacacatttctgtttatgatttccacgcacaaatttaatgcctttttcatcttaactaagcacttatcacacacttggctgtactttttagagcttgcagtgcaataaacaagactaacagaaatttctttttccttcttacattttcaccgctagaggatttgttcttactatcgatgttagcaaactgagcacattacttctctctttttctttctttcttcctttctttctctttctttctctttctttctttctctttctttctttcttctttctttctttctttttctttctttcatctttctttttttctctttattttatgtatttacttatttattgagatggaatctcagtctatcatccaggttggggtgcattaatgcaatattggctcactgcaaacgtctcctcccaggttcaagagattctcatgcctccgcctcccaagtagctgggattaaggcgctcgccaccgtgcccaaataatttttgtattttttgtagcgatggggtttcaccatgttggccaggttagtctcgaactcctaacctcaaaagatccacctgcttcagtctcccaaagtgctgggattacaggcatgagccaccaagactggcctgtatattctgttgtttgctggccaatacttatatgaatcttggagaacatcgtggaaagatgctcatcatcttgttaactggttatttcaatagtggaactggagggggaatactgcctttccttgtatttatttgtaatgtttcattttcattatgaacatgtattattctaatatgtttaaatattaataaagacaggtaaatatatgtaattttaattcaagctgaaatcctcaaggcaatcacatataattaaatagatggaggaaagaaaacatttaaaatccctgaaggaaaaggagggaagtccaggcaaggagtctcatgcttatgtcagcacttggggaggccaaggcaggaggatcacttggggtcagaagttcgagaccagtttagccaatatggtgaaaccctgtccctactgaaaatacaaaaattagccaggcatgatggcatgcacctgtaatcccagctacttggaaggttgaggtgggagaatcgcttgaacccgggaagcagaggtttcaatgaaccgagattgtgccactgcagttcagtctgggtgaaacagtgagactctgtgtcaatcaatcaataaaaggaggggggaaaacacaactaaaaaaataagtgattcaaaagtagcaatgtaccataatgcctaaatttgtgggattggcggggtgtgatggctcccgcctgtaatcccagcactttgagaggccaaggtgggtcgatcacctggtcaggagttcgacaccagcctgatcaacattgtgaaaccctgcctctactaaaaataaaaaatttagcaaggtgtggtggcggacacctgtagtcccagctactagggaggctgaaacaggagaatcacttgaacctgggaatcagaggttgcagtgagctgagattgtcccactgcactccagcctgggtgacagagggagactccctccaaataaataaataaataaataaataaataaataaataaataacactttgtgggaccaattccaatcgagtccaggggagcacacactggcgaccaacatcccccctcaggtcccttcagggtcgagagagtgcatctggaacagactgggaaactccagcaggcaaagtaaggttccaggaatagacacacctgacacattctccatgtgccctccacccaaccctctccccatcaggcttccatcgggctccaattctgcactctccccaagaacctcagattgaaacattgcaaggaagacaccgatactcaaagtcacaggcttaggaatctgagctacaaagaaaaatgagcccctgctcccccaactgcctggtactcccctcagcactgctgcccttcacctgccccctcctccataatttgaactgtcctcacagaagctggagagacggctcgcctgtcaggaaagagaggaccagcatgtggcaaatgcctggagtatgtaggagcagatggagagattagcacagggatgtaagaaacaagtggctctcagaccaaagaagactctgcgggagacggcacattaagccttcataggggcgtgtgctggacagcagctccccagttaccgaaacaattatctgagaaaggctctgagctgacccgaaacacccttggatcccatggcaacgcctcagcgtctggcagtaataggtttctgtgcccataatctctaggtctggaggtcccaactccaccagcctctcacagcccagaggtacatcccattggcgcctgatgggttagggaggctgttcttccagctgtgacagatccagcctaggagcgctcctgggtcttcttagttgtttcttcccgcacacctgccactcaaagccacaacccacttgcacaccaccttgaggacaccttaaaacgactgcctagatgtgaaccgcgctgagggaatggtcagctttactcccattagatggcttggcccaaaggacctagcgaccactcagacaaaaatttcttcctaaaagctggatgtgtctgtgatctctaagaggcaaaactaaaccctaaagaaaaagccaacccacccccacctccacaaaacaaaaacaaaaacaaaacccaccgccaacccacctttcatgtgaggagtccttgagaagggcctctccagccaggaccaggcaagggaatctatgcacttggccagacccagaacacacagtgtcagggacctcacagtcacactctgacctcatagaatttccaccactgacacacagatcaggatgtgtcagcctgagagatgacaccacaaatctggctttcacagattgattccacacacatcccatcactgacaccagattccctcatcactgaccctacatacccacaagaattgattccatggatctcatcactatcccaaagactacccatcataatctacagattgtcatctctcaccccagggaccccacagattccccatccctgattccaggatctacagaacctcatctcttacccccacagacctattaataaaaggatacattcataggagactgtgttgaccattttacacacccattgcctgtgtgtgtgtgtgtgtgtgtgtgtgtgtgtgtgtgctgattaatggacttaggtaaactttagcattttggtaggcaatgcaatttttcaatgccttttctttctttttcttgtacatctttaaaggccttactccagtaagtatgcattgcagtttattaatgcctatcccttactgagtccttgtcatgcgtatttgttattaatcataattcacaattcttataattcagagacaccagagattcacataagaagaatggctttgggtttttatttatttatttgttttggtttctgtaagttatcaaattcattcatttgtatcaagtcactaagtgtatactttgttttctaaaaaaaattccaatcaattttttttttaagacaggttatcgctctgtcccccaggctggagtgcagtggtataatcatggccactgtagcctcaacctcctgggctcaagtgatcctccctcctcagcctatgtagtaagctgagaccacaggcatgcaccaatatgcccacctaattaaaatttttttgtagatatgtgtgtctcactatattgcagagactggtcttgaactcctgggctcaactgatcctcccaccttggcctcccaaagtactgagattacaggtgtgagccactgtactcagctgataaaatcttaaaaagaggaaaatactttggggcctaatgtaaaatttccaccgagatgatgcgtcagaaattaaggtagaataagatgtccctagggcatcaaaacaacaaaacttaatcttgggctgggtgcggtggctcatgcctgtaatcacagcaattttggaaaccaaggtgggggactcacttgaggtcagaagtgtgagaccagtgtagccaccatggtgaaacgctgtctctactaaaaatacaaaaattagcctggaggttgcactgagccaagattgtgccaataccctccagtctgggcaacagagggagattctgtctcaaaaaaaaaagaagaggaagaagaaagaaaatcttaatttcttcgtcaaatgtaaaaactatggactggactctggaggaataatacacaaaaagacagataggcactatttttttgaagttttattgagaaatattgataacataccacagaagccactgatttaaagtgtaaaattcagtggttttcagtatatttgcactgttatgcaaacatcaccacaataaattttagatcattttcattaccctgaagtaaacaccatatccctccatttccccccaactcccctaatcctgggccaccacaaatctactttctgtttctatgtgttggtctattttggacattttatttaaatggaattacataccatgtggtcctttgtgaccggcttctttcacttagcataatattttcaaggtttattcaatcttgcatgtgcaaagggggcactttacataaggataaacctggagtggggggtacttactgattgatttggaaacttccctccgaaattgtaaaggctttcaaatagaggaacaacctattcaggctaaaatcctgttttcagcagtttgtaatgtggggttttattgcaaagaatggcaagatttttgggcttattttctgcaaattctccctgtgtttggggaacagtcacagaatgtggaggaatgagcttctaggctctgtggctgcagattcatgtccaggagaactcaggtcccaggataggcagagaaaaacagtgtaagaaggccaacagaatgctttgaaatggaaaatttaaaatgttccctccaaaaggagtcccagataaccacatagaagaggactttgctgggcagctccatcgcaattgttcaatactaagatacagacagactgggaaagaaggaagtttatttctgcagccacttacagggagaagcgccaggtaaatcaccagatcaactcaaagttacaagtttttttttctagtgcttatatatatcttaagctccatgtgggattgcacctacaagcaggagtgtttcattcaatcaacatctaatctttaactcgggtctagcgtctggaaagatttccctagagtcttggaaagtttttgaatcttaagacaggccgaggtgaatgtgtacgaacgctatcattattcgatcagattttagggtctgagaaaacccagacggggtctcagtgggtttgttttcacattccatccgtgatactcaggcaccagtttctccatttctttaacgttaacttatgcattcatcaaaattatagtaaagggttagtagaaactgttctggttgctattgcaaacctggcctgccacaggcactgaagcccactatagaacattgaaaatgcctgcaaacactgactttactgaccagtcaattaaattgcagaaaagcaagctcacgctgcctccctgatctgtcctccagaattgctagttagaaacgttcacattgtcctaggttcagttttgcaaagatggagcctggcagtgaaagcatttgtttgagttcatgcattaagatttgctttgtctatttcttttatatttatttatttatttatttatttatttatttatttatttttgtgatggagtttcaatcctcttgcccaagctggagtgcaatgtggcggtctcggctcactgcaacttccgcctcctgggttgaaactgttctcctgcctcagcctccaaagtagctaggattacaggcatgcgccaccatgcccggctaatttttgcatttttagtagagatggggtttcaccatgtaggccaggatggtcttgaactcctgagctcaggcaatccacccgcctcagcctccaaaatgctgtgattacaggcatgagcaccctcggccggcctattttattttaagatggagtcttgctctgtcgcccaggctggagcgcagtggcacgagctcggctcactgcaacctctgtctccgggattcaagcgattcttgtgtctccgcctcacaaatagctgggattacaggctcccgccaccatgcctggctaattgtttatttttagtagagaaggggtttcaccatgttggccagactggtctcgaacttctgacctcaagtgatctgcccgcctcggccaccaaaagtgctggaattacaggcgtgagccaccatgcccggccctatttcctttattttatttattatttcgagaaggagtttcgctcttgccatccacgctggagcgcagtggcgcgatctcgcctcactgcaaccttcacctcctgggttcaagcgattctcctgcatcagcctccggagtagctgggattacaggcgcatgccaccacgcccagctacatttcctttattttattttttataatttactaccctgtttgttgatgacaagactggctgtgcacaaggttgggtctcggtgctcaccgggagccgggcatggaccaggtgggaggttctccagtgcctgatacaaatctgcaagaaagcgcaggaaacggcactaaaggtaggcgttccagcgcagaaatgcgcaggaatggttttcctgtgcttgtagggaggtcatccccaagcgtttcttattggcttccagtgagacaagatcacaccactgcactccagcccgggctacagagtgagactctgtatccaaaaaaaaaaaaagagtgctgaatgaatatccattgatgcatgaaatggctgcattaaaggaaaactagacaagaaaagacaaggcaaaaaaaagtcaaggatcagtatgaaaaataaatatattctaaaagatttgtttttaaagcaactacatgggtttaaattttaaagggaaagaagtagctccaagatagaggaaacaggatggcttctgaagaagggagcattattctttgaaatggaaagaaattatgacaagagggtagcacagactgtccaagaggtggaggtaaaagggggttcttggccagacacagtggctcacacctgtaataccagcactttcagaggccaaggcaggtgaatcacctgaggtcaggagttcgaggccagcctagccaacatggtgaaacgccttctctactaaaaatacaaaaattagctgggcatggtggcaggtgcctataatgccagttcctttagaggctgaggcaggagaatcgcttcaacccgcgggtgaaggttgcagtgagccgagattgcatcactgttctccagcctgggtgactgagaaagaatctctctcaaattaaaaaaattaaaaaaaatgtgtgtggtgggggtatcttgactttcctccatgtgtcttaggccacaactcttacatgggaccttgcagaagagattcctcaaccaatacctttatggtgctgcctccctgatgggctgggttctaaacagcagtgccttccccatctgctcagtccttactcacctgggcaccatcctcctggtacgtcccttgaaaccatgcaggactctttcccttgctccagtaaggaaatcacatcaggctttgggatagagagacctgtttataagaaaagaagtaagatggccaggcatagtggctcactcctgtaatcccagcactttaggaggccaaaacaggtggattgcttgaggtcaggagttcaagaccagactgaccaacatggtgaaatcccgtctctactaaaaacacaaaaattgcccagacatggtggccagtgcctgtaatcccagctactcaggaggctgagacgtgagaattgcttgaacccaagatgaaggttggagtgaaccgagatcgcaccattgcactccagcctgggcgatagagtgagacttcatctcaaaaaaaaaaaaaagaaagaaagaagaaaaagaaagaaagaaagtaagtaaaaaagaaggaaagaaagaaagaaagaaagaaaagaagtaagacatactcctgctgttcctgaattcaaagttagtcccttagtactcacgaaggactagaggaaggtgtaaaggtctgaagcatggagaagatggaaggaccccaaagagctgcccatctattaatctactaaacacaaaacaattccctaggcagcaggtgaaaagtcacccagacaagtgaaagctacagccaaaactcatgagttatttggggatagacatccttacctagtgagaccaggctgctatagttctccatcattacatctctctataagtccttctgagcagtgtccaggccctcccattcctcctgagagaagtcgatagacagatcctggaacatgcccaacccctgaaatgacaaacccaggcagcgctgttgaaattaaaggaaaggtttttaagatgaaggaagagatggaagggtgctgaaggatggagagaatgtagtgtgcagaccggctaggctgagagtggggaagagtaaaaaaattagtgtgacttcaacaaagtaccttcatgttcatgaatattcctgttgtggctgacaaacctccttcacagaaagggacattcccagtattccatggttagagctgggaatgaataaagtacattgatatattatttcccaaataaatgaaatagagttgaaaagcacacagcaagctgtaggcttggcaaagcttcaagaatattacagtaaacatctgatatgcaagttactatttacaacaaaagcttaataaataggcacttcccccttaccattttctttcttgtttttttttctcttgtttcatttttttgtttttgttttcactttgagacagggtctcattctgttgcccaggctggagtgcagtggcacaatcacagctcactgcagccgcaacctcccaggctcaggtgatcctctcaccttagctttgattagctttgattataagcgtgcgccaccatgtccagctaatttttttttttttttttagtagaaatgagggtttgccatttggccaggctactctcaaactcctgagctcaagcaatccacctgctttggcctcccaaagtgctgggattacaggcatgagccaccacacccagccttgtctcttttcttaaaggaagacaggatctttcaaaaatatctacaaaaaggttaaaaacctctattggccgggcacagtggctcacacctgtaaacccagcactttgggaggccaaggcggatggatcgcctgaggtcaggagttcgagaccagtctgaccaacatggagagaccattttagtctctattaaaaatataaaattagctgggtgtggtgacacatgtctgtaatcccagctacttgggaggctgaggcaggagaatcgcttgaacctgggaggtggaggttgcagtgagccgagatcgcaccactcactccagcctgggcaataagagtgaaactctgtctcaaaagaaaaacaacaacaacaacaacaaaacctctattgcactttgataattagtacttccataaaatagtatagatagcacttcgataattaaatgtacattggctgggtgtggtaacccacacctgttatcacagcactttgggaggccaaggcaggtgaattgcttgaactcaggagttcaagatcaacctgggcaacatggcaaaaccctatctctacaaaaatacatatcatatacaaattagccagatgtagtgggacatgcctctagtcccagctacttgggaggctgaggtgggagggttgcttgagcctaggaggtcaaggccgcagtgagctgtgatcctgccactgcactccagcctaggcaccagagcaagatcctgtctcaaaaaaaaaaaaaaaaaaaaggccaggtgcggtggctcacgcctgtaatcccagaactttgggaggctgagtagggcagatcatgaggtcaagggatcaaaaccatcctggacaacatggtgaatctctgactctactaaaaatacaaaaattagctgtgcatggtggcacgtgcctgtagtcccagctactcgggaggctgaggcaggagaattgcttgaacccagatggtggaggttgcagtgaaccaaggtcatgccacagcactccagcctggtaacagatggagactgcatctcaaaaaaaaaaaaaaaaagagtgggtatcatggtaggaataaactgcacacaggtcagacaaaagttacaagggcatctgccagtataaacaagtttcctgtgagacacctggtcatgggtcagatacttgagcattaggctgtggtccaggaaaaagaaatgtccagtgaaaggctactctaaagacccacaggcccctcccctagagccccattagagtgaggtagagtttatagccattctcctgagagacctcaagacctaattagaagaaaactataacatttgttatatagaaggcattttccaaagactagttcaaagatgaaagatatagtcttcctttggatataaaacaaaatctcaagatacaccaaaactgttttgcttttactgaataatttttgtgcatatgtgtttagctgcaagtgcctaacaagctgtgattttctttcctttcctttccctttttttttgtcttgagacagccttgctctgtcacccaggctgaagtgcagtggcctgatcttggctcactgcaacctcagcctcccatagctgggattacaggtgcctgccaccacacccagctaatttttgtaattttagtagagacggggtttcactgtgttgccgaggatggtctcgaactcgtggcctcaagtgatccacccacgttgggtcccaaagtactaggattacaggcatgagccaccatgcctggccaactctgattttctaacttgcctcatgtattaggttcatactgggaaaaaaacaggtcagagccattggagccacgtgtacagatgtgcagtagctctgctagtaacactgctgctttcttcggctcttaagacagatgagttcagcacgtgtctgcccttgctctagctgtctctgattccccccaacagatccacaatcatgtcactcagttagattcactttggatatcccatcattagattaaaaccagcaggtcaaaaagataacctgaggaaatgctttcacatccacagtgttctcatagggcaagtatcatttagacatgtcaggaccgtggttgcagaggacagaatgaagtgtcatccttaactggccatccaatgtcatcagcaagaacaggaggactttataggatattatctgatgttttctgaatattaccttacaaatgctgctttacttataacttaagaatagggaccctgtcttttaaagctttatacatcctcaagtaaaggtttttcatattaaatccattaataatatctaaaggccgacctggaaattccatttctaagtatttatccaaagtaaagatttttttttctttttttgagacggagttttgctcttgttgcccaggctggagtgcagtggtgtgatctcggctcactgcaacttctgcctcctgggttcaagcgattctcctgcctcaccctcctgagtagctgggattacaggcacgcagcaccacgcccagctaattttgtatttttaggagagacagagtttctccatgttagtcaggctggtctcaaactcctgacctcaggtgatcaacccaccttggcctcccaaaatgctgggagtacaggtgtgagccaccacgtcctgccaagaattttttttttcttgagacaagtctcaatctgttacccaggctacagtgcagtgaggtgatcacagctcactgcaacctctgcctcctgggttcaagtgttttttgtgactcaaccattaaagtagcttggaatacaggcacacaccaccatacctggctaattttttttttgtatttttggtaaagagcaggttttaccatgttggccaggctggtctcaaactcctggcctcaagcaaggccactttgggaggccaaggtgggcagatcacctgaggtcaggagttcaagaccagcctggccaacatggtgaaaccctgtctctaattaaaatacaaaaggtagccaggtgtggtagcaggtgcctgtaataccagctactggggagtcagaggcaggagaatcacttcagcctgggaggcggaggttgcagtgagccgagactgtgccactgcactccagcctgggcaacagagccagactgtctatcaaaatataaataaatataaaaatacaaaaaagctggacacagtggctcatgcctgtaatctcagcgctttgggaggccaaggcaggtggatgacttgagatcaggagttccagaccagactgtccaacatggcaaaaccctgtctctactaaaaatacaaaaattagtcgggtgtggtggctcaccctctaatcccagctacttgggaggctgaagcaggagaatcacttgaacctgggaggcagaagttgcagtgagcagagttcatgccattgcactccagcctgggcaacaagagtgaaactgcatctcaagaaaaaaaaaaaagaatacaaaaaattagcagggtgtagtggcgcatgcctgtaatctaggctacttgggaggctgaggcaggagaattgcctgaacctggaaggtgaagattacagtgataagactgcaccactgcactctagcctgggtcacaagagccaagagcgagaatccatctaaaaaaaaaaaagagtttctatttggggtgcaaaacaaaagaaatggagtgaaagggatgtaaggaaattgaaagtcaacaggctaataatgccaataaataatgatggagcaaagaaatcagtattggccaaataaaaccaacgtgttttgtaatattttttcaaaatttagacaaagttttccagtacactgagacacttctactatcaagactataatattggctgaacacagtggcttatgcgtataatcccagcactttgggatgccaaggcaggaggattgcttgatcccagaagttcaagtcaagcctgggaaatatagggagacaccgtctctgcaaaaattaaaataaaataaaataaaataaaataaaataaaataaaataaaataaaataaaataataataaaataaaataattaaaataataaaataaaataaaatgccaggcatggtggtatacctctgtgagctgtgaccaccccactgcactctaggcttggtaacagagcaagaaagaccctgtctcaacaaaaacctagaatatagaataaatgacatttgggtaagtggaatattaggtgttcaataaacataggttattccctccctatctccatagaatcatcaattttattttaaaagagaagttttgattagaatccaaaaatatcaatacttctctttccaaaaaaggagggaggatttaaatataacaatttcttggttatttctatttattttcatggttgcttaatattactcagtaacaaatatgcaattgctctctttcaaacgtagttttaattagttgcacaaaatgccaacttatagtctgatgtacttcaaatttccctatctatgaaagctaaatttggatattatcatctcaagaatattataatctctgtctttaaatctatctggggttctaccttttctgtaagccttagtgaatctcactatagtcctccttccctttaaaaatgcagtgataggccgggtgcagtggctcttccctgtaatcccagaactttgggaggctcaggtgggaagattgttggagctcaggagttcaagaccagactgggcaacatggcaaaaccccgtctgtgcaaaaattacaaatattagcctggcatggtgccatatgcctatactccagatacttgggaggctgaggagggaggatcccttcagccccagaggtcaaggctgcagtatgccctgaccctgccactgcacttttggaggccaaggcaggtagatcacctgagatcaggagttcgtgaccagcctggccaatacggtgaaaccctgtctctactaaaaatacaaaaattggtctggtgtggtggcgggcacgtgtaatcccaactattcaggaggctgagacaggagaatcgcttgaatctgggaggtggaggctgcagtgaaccaagattgcaccactgcagttcagcctaggcaaggcagagtgagactctgtcaaaaaaaaaaaaaagaaagaaagaaagaaagagaaagaaagaaagaaagaaaaagaaaatcagtgataggtgaggcagctcatgcctgtaatcatagcactttggaggcagagggggaggatcacttgaactcaggagttcaagaccagcccagacaacatagtgagtcttcttctctactgtaaattatttttaattacaccatagtgctagtgtgtgcctctggtttcagcttatttggcaggctgaggtagaaggatctcttgggcataggagatcaaggctgcaatgagctgagatcgtgccactgaactccagcctgggagacagagtgagactctacctcataaataaaaataaatacataaataaaaattcagcgatggagttgatggatttgaggttgaggacccccaatgtgaacccatttggaaaaaactcaacctgtgttcttcctctgcttcacaccaaaaacacaacaatctacccagaagacttctgtggcctcaaaatatgaggcgatttctccctttcaccaagcaaggaatcagttctgcagcagacaccagctgggtgtccaccaattcgattctgacactatctgccataagacagtgtcacctcacagattgagggctcagcccccaaaactgcccccctttcagacaccagtcacaagtcccagcctctggaacttctgactgatgggtttaatttggggttcctatgacctcctctttggtttgattaatttgctagaataaaatggctcacaaacctcacggaaacacatttactatttgattataaggatattccaaaggatatagatgaagagatgcctagcacgaggtatgggggaaggggcacagagcttccatcccctccctgggcacaaccctccaggaacctccatgtgttcagctctctggaagctctccgaatccactcctttggggtttgtaaggtggcctcattacatatgcatgattgattaaaccattagccacttgccatcaacttaatcctcagtcccctccactccccaggggtgggagggtaggggctgaaagtcccaaccctctaatcctgccttggtctttctgatgaccagtccacatcctgaagctatcggtcaatcactaacatataaaaagccaaagcctgggtgcggtggctcacgcctgtaatcccaacactttgggagcccgaggcaggcagatcacttgaggttaggagttcgagaccagactggccaatatggtgaaaccccgtctctactaaagaagaaaacaaagacaaaaattagccgggcatggtggcacatgcctgtagtccactcggaaggctgaagcagaagaattgcttgaacccgggaggcagaggttgcagtgagtggagattgcgccactgcactccagcctgggttacagagcaagactccgtttcaaaaaaaaaaaaaaaaaaaaaaaaaaaaaaaaaaaaaaacagcaagcccttaggacattccaaggattttaggagttgtatgccaggaaatagggacaaagaccaaatttgtatttgacaaaatcacagaaccgtatgagtatttaattcaatacaggcatggaaactggcccaagcatttactcacagatgactgggcaaatccctggtcctatgggtacaaactattgatcaaacccccaatctcattcctacccctaaaatatagcaacgtgaaagatcttattacctatttggactgagattaacaccatcccttaaactgcatggctttcaatcccagggctatggcgtgtgatgccacatagaatatgcatgaatcttctctccaacaattgagttgttaggataaaggctcttgtctttgccttctttctctcacagccaagaatattaaggaacgtggacacaaagaatgagtttggaacagaagtttaataagcaaaagaagaaagctctccccagcagagaggggacccgaaagagggttgccaactaggaggctgaatctgggggttttgtgaactgggaagaggaagaatgtgctcactggtctgtgagctgtcttggagatagcacgacttcgcttggcccgggaccttagcctgggaccaatcagaggctgaagtgaaattttggcccaagaccaatcaggggctgaagtgaaagtttggcccaggaccaatcagaggctgaagtgatgattcatagaggctcggctcacagtccaaagcatgtccagaaaacaaagtggccgccggagcctgttagtccaagctgcaccgatttgtaagcccccaccatttcacagaccctgttcagagggaaacattccactggggtttgggctgcgagaaacatcctccccaaccgcctgacttccttatcacatcctgctggggtagcacttgctgctaccctgtgagggatggaggggcaccctgaagcattggagaagtgcatgagtgacctagctcagatgatgatatcatagtaaccctgtttattatttatcacctaccatgtgccaggccttgtgcgaagtactttgcacacattacctgccataaagctcagagacaactgtaggagtgaatctgttataactcccactttacaggggaggaaactgacgcccagagaggtgaaccagtcttccccaggccttgcacctagtctctaggatgtggattcaggcggtctgtctcacagatcccctcatcctcttggtttttgctcctgcagccctctggcctgtccccaggaccctgtaaccttggccacccccaagatgacctggacatgggcttcagcaaaggcagcaaccccagcatatctccatttgatagggaggaacctcaggcccaccacaggagccctgggctgcaggtggtataggtgctggctgaaccacagtgcacccatgttggaggatgcaacataggatgggcagcagcaggaggtctccctgcccaacaactggtagtggtacctgagaacaaaggaggagaaggaagctttggatacaggtgtggagaagcccaaggaggaagaaaaagacttggactatgggctgctggatggcctcaaggatcccctccccgaaaaggaattttgagacttatacccagggctgagatgaaagtgcttcctattttctatcctggaactgctgcaaacctcggtgtgacatcacagggcctcatttccctatttgtaaaatgggattttatgggggttccaatgagagactggaccgagagcattttgagaattgtaaaaaatgtacattgagggaataattattatcaatgggccattgctcttccaatagttagtattctttagcaaatattggaaggtaaaatatgatttattgaggaggtttgcagcagctgaggccctcaagagtcttttctgtctccgttcaaagctggcctctgacagggaccttcttggtgctacccctgggcccctcattctttgtgcaggcttctcagggttcttatttctattgcatcttgtggttccctggtggatggcatgctccatcttcactcagagctaactgcatctcctccaggcccatgtcccttgtgcagcacccattgcttcctcaccaggattcaaaaccttctgtgactgacctctgctgacctcccaactttatctcccctcattctttctgctcctccagttacatgcctgagcccctcaatcctgtggctcacactctcacccaagctgttctccatcaggatttgcttggctcccttttctgctaggcaaatttgtgttcatccttccaagccttgcacagatgtcctcctctgaaagctctccctgaggtcacagagtcctggaacaaggtagtcattgctcctctgctgcctctgcattttgtgcctttatcactttggtgtgactgcccgcctcctgctgaatggaggcattttggctttactcacctcagtatctcctgggtccagctgggtgtctggcctggcccagaatcagtgctcatcaagggtgtatagaactcacaaggacccaggaatgttttgtaaataataccaccctcccacacttctccaatgcttactttctaagctcctttactctttgacattcaaatttctaaatggcctgtatgtatttacaaagcctgggaaaacgccttcagaggacaaacacaccccaccggcaaaatgtatttgcattgactaggattatggatgatattcagccttctggcaaatgaatcatttggcattggctgagtatctgctctgtgccagatactaagctgtgatctctagaaagagacatgaactactgacacagtccttgaccccgaagagctcagaatccagtgagcttgatttcttgtaagttagagacagagttcagagcagaagctgaggcaggagaagagaagtaaaatggacacatcagaggcagtgacagccacacagctgtctggggacactgagtgcagcaacaaatagcttaggctgccttggcagcccacgaaggtatcacggtttcctattgcagcatctcagtgatgcttttgttatgctgatctctgcaaagcccctctgtaccccagcccaggatggtgactgccatgctgtggagaaaagggcagtgaccaggaccacaggctcagagcttgcaccctggaccacctgggaatgggagcccttcacatgttctctacctctgtgttcaggttgggggtcctggccaaggaagggagatgacccccatgcggggtcaaaaggacacactcccgggaacagactgtctcttctttctgggtaatttctgcctctgcagtgaatggtgaaaccagacacatcctctctgttggtatgacacaaagacaggcgttcctgctcatgggctgaatcttcagatgaggggaggtgtagcaaactcctgtgctctgatgactaaggcagggacacatgtcaccccatcggaatgagtgtcagaccaatggctaaaataaaatcattttcaatattcaaaggaatcaccttcattcatctacaaatacttttccttttctttcttttttttttttttttttttttttttgagaaggagttttgctctgtcgcctaggctggagtgcagtggcatgatcttggctcaccgcaacttctgcctcctgggttcaagcgattctcctgcctcagcctccggagtatccggtgtagctgggactacaggtgcccaccaccacatctggctaattcttgtatttttcatagagacaaggtttcactatattagccaggctggtcttgagttcctgaccttttgatccgcctaccttggcctcctaaactgctgggattacaggtgtgagccaccgcatctggcccaagtttttttctataaaaccacatattgcactcagggtagggtaaatgatgcatcatgcctgctggcaacatgggccctatctggaaagcgagtgcccaccaccatagcacagttccatgcagtgcctgtgtggtgctgaatctcaggagcagccccaatcctgtgaaccacaactacagggaccttagacataagcaaatacttctggtggccaggcctgccagcaagcagatgctaaccctgtcctgggggcctgcagagaggtcgggccagtgcagaggtggtgagacccatgtctggtctccccaactcccacccatgctatgcaatgggggcgaccacgcacccgatctgcctgggagggtcctagtgtgcccactgccttgctgagttatgagggatgctgcctctcacatctcaccggtatcgcatttgaaggacaaattatgtcttcccttccccaccctgtggacctccgtttcctcatgtgcaagtgggggatgataggcttacatggttatgcagtgggggtatcaatgggatccatctgtcaataccttgcatccagtgaccacctggagcacacctgcagttcgcaagttaggcttcctgctgcagtgaggggagcaagcactgcctggagccagggagcttctctgaaggaggtgttggaaaggacttgttccagaatttgggcttgtattgggagcttgggggaaggttgaaagaagcctttgctccagattggatgctgtcagaggcagggtggattctatcacctggcatcttccccaatcttacctagaaggaaggaagacaagaccaaagctaacgctgcaattgacagaggtagtggtcatgacatagacacaggggagggggtgtgaggtcatttttgtccatgttttgcatgagctgagccatgatagctaccaagtgaccttgctttgtcttgacccatcatggtcacagagcgaccttgtctgatgctgacaacctgtgcagttcaacaggagaacaccaacgtcttgccagcagtggctgctgtcctcctgaggcctcgcttctcctcctctggggcctactgctgaccgtgggaggtgtggagtgggaagggaatatgccgtgggttttttttttttttttttttttgcagaacaaggacaggggactctgatgccttcagctctggccatcctgagtgctgtgatctgcttcccctgcttcctacaccacccacaatcccaccacgctgctgcagtcactgccaactcatagtgccttctaagggccccagtgtctctgggacacccctctcccctgggagggaagccaggtgctcatgaatgtcccaggtggaggtgctgaaaaagtgtggagatgccttcttgagtgtcaaagtctgggattccagctttcagcctcaggctccaggtgtgtgtgctgaagtggaattttcttctctcgttcactctcctgtctggtcagaggaacttggggagtttcctctctaggggagggaaaggccctggagaggtggccttgccctgaactgggaaggggtgggcatgggaaagcaggggcctgggctctgcctactgcttgctgagagcttggacatagcactgccctccctcagctcctgtctcctttctctgtatgattaggtggaggtggatgggattctgcttctactcccagtccttgggcaccatgtcaggtactcacacacttatgaccccatctggtctttggaatggcactgggggatggatctgtcaatctcacgttgcaaatgtttgttctaaatcccacactctgaagtcagaaagacctgggttagccctcagccactgacggttgcttgctatgtgaccttggacaagtcactgcccttctctgagcctcaacacccacatttacacaggggaagaataatacctccctcttgggctgctgtgaagcagagctaatgcgtacattgcctcaggcacattgcaggtgctcaaagtgttggtctttccttccctttctaggtctccatttcctcatctacacagtagggagcaactctgtcctgattataaataagacaacaggtgaatgcactcagcaagcctaggggcaaggatgcgtagagaagcttcttgcaaaggtgaagaatgtgtgctctgagccccgtgctgagaggcaggtgagaggacagcaagcccagcgactgaggcctacaaaatgccccctgcagagagggaggaggagcagtgttctaaggcgggtgggaggcagcatccccagtgcttgcaggaggagcaggactgttgtgcttgctcaggtgggtggtaggttaggttcttaggtatctgctgggtatcagatgctgcacaagcatcatctccgtgaacttaatctttccatcatccctgagaggtgggcattacaggggcatagtgggattgaaacacaggtcccctgagcctgtgccttttctacaaggcaatttagttcacatgtaataataggacccaaaaatacacctgctatgctgtgctcacctgatttcataacatccttgtgacctgccaggttggtgaactgtcatcattttatggatgagaaaactgaggctcagagagggtgaataatttgctcatccttccaaagaactaaaaggaagagaggtgctatagctgtggggccttctattcctggtaggaagtgtgcagtacccaaggccattctgaccccagtgcaggcaggagaaaaggcacatcaacaaatccagcagcaagcttccactgagggcctccctggcctttccttgcactagtgctgagggagaaacagccttgttccttcacctaacatggcttcttgctgcccccaggataaaggtcagagtcctcaagtctgtgtttgagactcttcatggtctggtcccacctgcgtttccagcgaaatcctccaccagggtccccagtgcagcagccctggccacctgtcccatcctaccatcctgacttggctcaagctgctccctctgtcccatggtcttcacacatagaacaaggagaagcttgatataggctaacctgaattttccatttgagagcattttcagcttctggaaacagacatttcacccaaaattccagattccctgcttctctgaaaatacatacatacatacatacatacatacatacatacatacatacatatataaatctgctcttactctgcactattctgttttctgagacagagtttcactcttgttgcccaggctggagtgcagtggtgtgatctccactccccacaacctccgccacccagtttcaagtaagtctcctgcctcagactcctgagtagctgggatttacaggcatgcaccatcatagccagctaattttcatgtacttttttttagtagagatggagtttcatgatgttggtcaggctggtctccaactcttgacctcaggtgatctaccagcctcggcctccgaaagtactgggattacaggtgtcagccacctcacttgtccagtctgcactattccttagtgtcagacaatttgagccaaacaatgtctttctcatttggacgtgaccttcagggtctaatttttgtattttcagtatagaccagttttttttttttttttgacagagtttcactcttgtcccccaggccagatggtgcagtggcatgatctcagctcaatgcaacctccgcctcctgggttcaagtgattcttctgcctcaacctcccgagtagctgggattacagtcacctgacaccacacccagctaattttttgtatttttagtagaaacagagtttcaccgtgttgggcagactggtctcaaactcctgaccttaggtgatccaccctcctcagcctcccaaagtgtggaattacaggcatgagccagagcctggccttacctggctaattctttgtatatttgaagagacagggtttcactgtgttggccaggatggtcttgatctcctgacttcgtgatccgctggcctcagcctcccaaagaactgggatgagaggtgtgagccactgcacccggcctcaatgtagcttattatcaaagtatttacacagaaaaattaatcaaagggcacaagcatttcaatacttaggttaagatgaaatctgtggccggaagagggccagacacacatgaaatgttttgtgcatgaaggaaccacaacttaaaatgattttctgttattcgttttggtatgttattttggaaatgtgattaatcacgtatgtaaaggacgttgggaagaatttccagatactctgatatgcatgacatcttaatcacacaatataaagcaaggctatcttaggaaattaggtatcactgccaaggacctttacatgagatgataaattaaaattactattaaatttgtaacagtcagatgggctggcaggcaagttgcgtcatttttttctcagtattttttctttttccttgattcaataaaacaaacttaaatgccagttatctgcagaaccctcactagactatgtttaatgatatgtgaaacacagcctgcacactcacagatccttgccacgtcccgttcccatcctctcaaaacctgtgttaccctgtggctagatttctcaaggagatgaaagagagagacgaatgagaaccaccttctttcaggtcgctctgcactgctcctgcaggtagacaatgacctctccggtgaggctattatccttggcttgggggtggaggcctttatcctggaaaagaggcctctcagggtggggaggtgatttaaattcttatgagagagacgcagctccccatctcatctggaccttcacaaacctaaactggaaccgccagaaaaatgactgacaacgggccacgcaagccaggcagagacgcggggagaggctgaccacaagaaaggcggacgtagaagataccgtcctctggcgcacagggcacatatgtcccaacacacacacacacacacgcacacagggacacagagcaaaagagtgagaaaagggagagagagaaacaagagagagacatacgcacacacacaaacgcacagacatacagcagtggcacggtaacacctacacccaggcagcccctgaattttcagggttctgctctccacgactacaacccactagtgagagagcagcccacgggcacacaagcaaacctctccttttttgaagagactcactggcacaccgtccgtgcaggcctgaacctgggatcccgcgctgcttgcccggccctccacctgcagtttcttcctcctggacgaccctccgtgaatcccggcctccagagactatcctgttgatgccctggccaggactggtcttagccccgacactgactaatccctctagtaccaggtactcgggaggcggaggcaagagaatcacttgaacctgggcggcagagtttgcagtcagctgagatcccgccactgcactcgactgagtgacagagtgagattccgactattaaaaaaaaaaagatagaaaagaaaaatgaccgcggagcggcggctgcggggactggggcggcggcgggtgaagtgaagattgggaaaagggcttcgtcgacccttcccgaatccgggcctgaggctgggatctcgcgctgccgcccggcgatccgcctgaggtttctaccttctgaggtttcttcctggtggtcagccctccgagaatcccaggctccggagaccatcctgttaaagccctggccaggactgctctcaggcccgactctgacgcactatcacacagggctcctacttcgcaaagtctcagggacccatccacggcaacagtggcaatcactacgaccaaagcggaggctcaggccttgcgcatgcgcactggcgagaccgaatccccgcttgctccgcagagtccggcggcggatcctttaaaaaatggcggcgacgcgcggctgaggggactggggcagcggtggcggcggcagcgcagtccgaggcggcgggtgggaagaggactacgatagggtcctgcgggagacccaagggttgtacccatagaggtcctgtcatcaggaccttcttgatcggtcttctgcttcggttaccggtggaggaggagcttcagggtgcggctgggctctctggaatcctcttcgacctgactatggatcccacggggtgatcaagaatggggttacaatgcagtgaggcgggaagggtctcgctggggcacagaaagatcctaagggctgcaaggtgaactgtcagctgaaaatgcactgacccatgagcccactgcctccctccttcctaggtggagcagtggcctgacttcatctccaaggttcggggctctggcatcccgacactgctttccgcagcatgtgcaaggagagacagaggtgagtccgagatggagccaatgtgaccacacgtggcactaatgttccccaagagcagatggagtcagggtgggtctttgaggccatatggggtgatgctgagacggatagtgacgtccagatgtgcgcaggtgggtcactgggacctcccacacaaagccaaggaaaagccaagcacactagaaaacctgtgagacagggcctgtgcctgagtccaagccacattcagggatgactgccagaggggccaagaggtttcgacaaacgacaccataccgacatcccgctaccggtaggtacccctgacgccacctcccctgcacccagcaaaacccagtccctttggctccctgacatccgtggcagccaaaagattcagtgcttagaggcactttccccaggagcagaggaacggaatggccctcaggaatgagagaggaagggcaggtgggatgcaacactaacttttctagaaggcaaaggtcagccacagtggggttgcctcccgctcttcctggacggaccacaaagccatcacttgggacatgcagacaaagggagcttccctgtccaagacaggtatggaagcccagaactccaggatcatgacaccctatcatccagaaataggtttggagagggaagcaatcataaaagggaccccaacgaaatttcttcctaatggactgagaagtgttctttgttgaagacattgagccagactaagaagcctctaggcttcacaggaactgggcagacagaacaagagggaggacagagcagaggccaatgccacagcacaatgccactatcacgggcatccgggaaaatgtgccaaatgggtgactaggccaggaaggccagcgtttgagtgacagacatgcttgccccatcttgtagccagcttccttctccgtcccagtgtatagctgtgggtagctttctcaatgagggcaaagggcgagaggagtgagaaccatcttcttgaagctctgtgggcacactcctgcaggtggacaatgagcacctctgaggcctttgtccttggctggggtgcagtcgtcttgatcctagcaaggaggcagcacaggatgggaaggatattaaaactcctgcaagacaggccggaggcacgaagccccttcactgaagcacagccatggagaactcctgctatgccaaaattcagggactggatactaagacaacagtggaaatcactgtgacgagacaatcagctagagccacgcggaggcacactggctgggccgactaaagctccggtgctggacggcaggcagctgcccctttaaacaatggctactgcgcggtagcagatgggctcctgttgcagcctcggcagcgactggatccagggtaaagtttgcagcggcctggtagaggctgtggccggtgtcctgtcccagggcgaaacccccagaagtcctgtcctcaggacctccttgagccgactcccaccaagggagggagagctacaggatgtctgctgggttctcgggactccccttcagatccgattttggccccctccgagtgagataggatgggctcaccacatctgttgaggcaggcagggcatcgctgcagcatagaatgatcccatgggtttcaaggcgtggtgtcagctgaaaattcactgatccatcagccctctgcctcccttctcctttgaaagagcactggcctgcccggcttctaaaagccatggggctccggaagccaaccgcaatttacaggacacgtgcaaaaaggaacaagggcgaatcccaggtggagaccatgcgatgacgtgtggctgtggcccatcccacagcagatggcgtggatgtgtgtaaccagaggaatgtggggcgacggcgaaacaaacggtggtgtctaagcatgtgcccggtggaagggggggacaagtgacatttccatcacagcaatgaaaacttaaagaacacctgggaaccaggagggggcttgtgactgaccggatacaaaatttgaaattgctgccagaggagcaaagagggttctgcaaatttcaccccaacgccaaagctccatcgcccatgtagccctcacacaacgtcctgtgcaccaagccccagccccaacaccagccccagccccagccccagcccaagaccgagcccagtccccttgtttccctgacattcgttaaggccaaaagatccagggagacagtccacccatgagaagaggagaggatgtccctcgagaatgagacaggaagtgcagaggaaatgcgacaccacctgtgctagaagacaaggccagtcccggtctcctagcgctcattctaggcaatccacccacccatgaatggaaacatggagaagaagcaagctttcctgtctgagacacttatgggagcaaagagctccacggtcacgagatctgcccaatcaagcagaaagaggtttggagagagaaacaatcataacagggatctccaggaaatgtctcccggacagactgggaagtcaagcactgggaagtccctaacggacagggaagacatgtggccagagcgagaggcatctaggacaggggaggcagagcaagagggaggacagagcagaaggagcaagagggagaacagagcagagggaggacagagcaagagggaggagagagcagaggccggagcccaggccggatatagcaccatgccaccgccacaggcataaggggaggggttccaaaagggtggcttgtccagcgaggtcaccgttccagtgacagggattgttgccatctctcattcccggcttcctcttgcagactgtatcatggtgtggcttcatttctcagagaagagccgtgaaaagatacaagcatcttctctgacgtgggtccgctgctctcctgcgggacaaagagctcctgtggggctcttgtcctcggctgcagtgtgatcattttgatcttaggagagaggccgctcaggatggggatgagatttcaattgctcccggacccatgcatctcttcacgtaggccaggacttcacacacccaaagcggatccggggcggcgaaaacgattgacaaccggcctcatgacaaaggcagagacgcagaaagagggtcaccaaagacaggccgccatgcgagaaaccgctttgtggcgcacagggcacattctgccaaagacacacacgcacacgggcacacacacacaacccactgagagagggaaagaaacacacagagactgagagacagagagagaagagagaatgggagaaacacacacagacacacacacacacacacacacacacacacacacacacacacacaatgtcattcaggagaggcattgaaacgcacacacccaggcaaaccctgagtctgcggggatcggctctcgacgagaacgaccctcctgtgagagagcaccccaggggcaggcaggccgacctgtcgtcgagatcacggacggcggcacgacttttggggagactcaccccaacccacaccgtcatggcaggcctgaagctgggatgccgtgctgctatccccggactccccctggggtttcctcatcctggtcggccctttgagactcctggcatccggagacgttcccgtcgacccggtggagaggtcaggccagagcctcagagccccgacacacaagcactgccacggagggctcctgctttgccaagcctcagggagtggtttctaagaaaaccgtgggaaccactgtgagggcaaaagaagctcgcgcctcgcgcatgcgcattgtcagggccaactcgcgctacgctcctcacaggcaggctgcgtcccctttaaataacgccgccgctgcgctggggcagcgaggctcctgctgcatccgccgcggtggctggatccggggtccagttggggcggcgtgagagagagggccgcgggtgtcttgtcgtgtcccagggccaaaccccgaggaatcctgtcctcaggaccaccttgagctgacttccaccgagggagggggacatcaggacgcctgctgtgttctcaggactccccttcagatccgattttggcccactccgagtgagataggatgggctcaccacatctggtgaggcaggcagcgcctcgctgcagcacagaatgatcccataagtctcaagacctagtgtcagctgcaaattcattgatccctcaggcctctgcctccctcctcctttgaaagagcaggggcctgacccgcttctaaaagacctggggctacggaaagcagaccgccctttacaggacacctgaaaacaggaacaagggcgaatctgaggtggagacaatgcgaccaagcgtggcactggcgtatcccacagcagatggtgagaatgtgtgtcaccggagacatacggggcgacggcgaaacaaatggtggtgtccaggcatgtgccggtggaaggggggaatgagtgacccctgcatcaatgccaaggaaaatcgaagaacatctgggacccggggatgggggcgccagtacctgacccaagccacgttttcaaatgcctaccagagtagcaaagaggtttctgcaaaattctccccacccccaaccctccaccgccctggtagccctgaggcaaattcggctgcacccagcccagccacagccacagtcccagctccagcccagtccctttgggtccctgacattcgtttgggacagaagatcaagggagtctttccacccaggagcagaggagaggatgtccctcaagaaggagacaggcggccatgcgagaaaccgctttgtggagcacagggcacattcggccaaagacacacacgcacacgggcactcacacacaaaccgacagagaggaaagaaacacacagagactgagagacagagagagaagagagaatgggagacacacacacactcacagaaacacaaacacacaaacacacacacacacacacacacacacacacacacagaggccctgagcagaggcattgaaacacacaccccaaggcaacccttgaggcttcggggttctgctcttgatgagatcgaccctcaggtgagggaacaccccaggggtactcaggccgacctgtcctcgagatcacggcggcatgacttttggcgagactcaccccaaccaacaccgtccgggcagccctgaggctgggatgccgtgctgcctcccctggactccgcctgggaattcctcattctggtcggccctttgcgtctcctggcatccagagacgttcccgtcgaccctgtggagaggtcaggccggagcctcagagccccgacacacaagcactgccacggagggctcctgctttgccaagcctcagggactggtttctaagacaaccgtgggaaccactgtgacaggagaagtcgctcgcgccgcgcgcatgcgcattggctggcctgactagcgctccgcttctggcagtcaggctgcatcccctttaaataacgctactgcagcgcagggcagcgaggttcccgctgcagccgcggcctggatccgggctccagtttgtggcggcgtgggagacgggaccgtgggtgtcttgtcctgtcccaggaccaaacccccaggaatcctgtcctcaggaactccttgagctgacttccacggagggagggagagggagcttcaggacgcctgctgtgttctcaggacaccccttcagatccgatttaggcccccaccgagtgacataggatgggctcgccacatctgctggggcaggcagggcctccatgcagcaaagaatgatcccacaggtctcgaggcaaagtgtcggctgcaaattcactgatcattcaaccctctgcctccctcctcctttgaaagagcagtggcataccccgcttctaaaagccctggggctcaggaaagccgaccgcgctttacaggactcgtgcaaacaggaacaggggcgaatgcgaggtggagaccacgggaacatgcgaggcactggcgtatcccacagcagatggtgtgaacgtgtatcaccggaggcatacggggcgacggcgaaagaaacggtggtgtccaggcatgtgccggtgcaaagggggaatgagtgacctatccatcaatgcaaaggaaaatcgaagaacacctgggacccggcgggtgggggcgcctgttcctgacccaagccacattttcaaatgcctaccagaggagcaaagaggtttctgcaaaattctcccaaccctccaccgggctggtagccctgaggcaacttcagctgcatccagccccagccacagccacagccccagccccagccaagtccctctgggtccctgacattcatttgggacagaagatcaagggagtctttccacccaggagcagaggagaggatgtccctcaagaagtagacaggccgccaagcgagaaaccgctttgtggcacacagggcacattgggccaaagacacacacgcacatgggcactcacacacaaaccgacagagggaaagaaacacacagagactgagagacagagagagaagggagaatgggagacacacacacacactcacagacggacacacaaacactcacacacacacacacacacacacacacacacacacacacacacacacacacacacagagtccttgagcagaggcattgaaacacacaccctaaggcaacccctgaggcttcggggttctgctcttggcgagatcgaccctcgggtgagggagcaccgcaggggtactcaggccgaccagtcctcgaggtcacggcggcacgacttttggcgagactcaccccaaccaacaccgtccgggcagccctgaggctgggatgccgtgctgcctcccccggactccgcctgggatttcctcattcttgtcagccctttgcgagtcctggcatccggagacgttcccgtcgaccccgaggagaggtcaggccggagcctcagagctccgacacacaagcactgccacgaagggctcctgctttgccaagcctcggggactggtttctaagacaaccgtgggaaccactgtgacgggagaagaggctcgcgcctcgcgcatgcgcattggcccgcccgactggcgctccgctcctggcggtcaggctgcgtcccctttaaataacgccaccgcagcgcggcggcagcgagcctcctgctgcagccgcggcggcggctggatccgggctccagtttgtggcggcttgggagaccggaccgtgggtgtcttgtcctgtcccagggccaaacccccaggagtcctgtcctcaggaactccttgagctgacttccaccgagggagggagggggagcttcaggacgcctgctgtgttctcaggacaccccttcagatcccatttcggcccccactgagtgagataggatgggctcgccacatgcgctgaggcaggcagggcctcgctgcagccaagaatgatcccataggtctcgaggccaagtgtccgctgcaaattcactgatccttcaaccctctgcctccctcctcctttgaaagagcagtggcctacccctcttctaaaagccctggggctcaggaaagccgaccgcgctttacaggactcgtgcaaacaagaacaggggagattgcgaggtggagaccatgtgaacacgaatggcactggcgtatcccacagcagatggtgtgaacgtgtgtcaccggaggcaaaccgggcgacagcgaaagaaacggtggtgtccaggcatgtgccggtgcaaggggggaacgagtgacctatccatcaatgcaaaggaaaatcgaagaccacctgggacccggcgggtgggggcgcctgtgcctgacccaagccacgttttcaaatgcctaccagaggagcaaagaggtttctgcaaaattctccccacccccaaccctccaccgcgctggtagccctgaggcaaattcggctgcacccagccccagccacagccacagccccagccccagccaagtccctttgggtccctgacattcgtttgagacggaagatcaagggagtctttccacccaggagcagaggagaggatgtccctcaagaaggagacaggccgccaagcgagaaaccgctttgtggtgcacagggcacattcggccaaagacacacacgcacatgggcactcacacacaaaccgacagaggggaaagaaacacacagagactgagagacagagagagaagggagaatgggagacacacacacactcacagacggacacacaaacacacacacacacacacacacacacacacacacacacacacagagtccttgagcagaggcattgaaacacacaccccaaggcaacccctgaggcttcggggttctgctcttgacgagatcgacactcgggtgagggagcaccgcaggggtactcaggccgacctgtcctggaggtcaccgcggcacgacttttggcgagactcaccccaaccaacaccgtccgggcagccctgaggctgggatgccgtgctgcctcccccggactccgcctgggatttcctcattctggtcggccctttgcgagtcctggcatccggagaccttcccgtcgaccccgaggagaggtcaggccggagcctcagagccccgacacacaagcactgccacggagcgctcctgctttgccaagcctcggggactggtttctaagacaaccgtgggaaccactgtgacgggagaaggcgctcgcgcctcgcgcatgcgcattggcccacccgactggcgctccgctcctggcggtcaggctgcgtcccctttaaataacgccaccgcagcgcggcggcagggaggctcctgctgcagccgcggcggcggctggatccgggctccagtttgggtcggcgtgggagaggggaccgcgggtgtcttcttctgtcccacggccaaacccccaggagtcctgtcctcagaaactccttgagccgacttccaccgagggagggagggggagcttcaggacgcctgctgtgttctcaggactccccttcagatctgattttggcccccaccgagtgagataggatgggctcaccacatctggtgaggcaggcagggcctcgctgcagcacacaatgatcccatgggtctcaaggcatgctgtcagctgaaatttcactgatccatcagccctctgcctcccttctccttttaaagaacactggcctgccgggcttctaaaagccctggggctctggaagccaatcgcaatttacaggacacgtgcaaacaggaacaggggcgaatcccaggtggagaccatgcgttgacgtgtggcactgaccaatcccacagcagatggcttgaatgtgtgtaaccagaggaatgtggggcgacggcgaaacaaacgatgctgtctaggcatgtgcccggtggaagggagggtcaagtgacatttccatcacagcaatgaaaaattaaagaacacttgggaaacaggaggcggcttgtgactgaccggatccaaaatttgaaattcctgccagagcaacaaataggtttctgcaaaattcaccccaaggccaaagctccaccgcccaggtagccctcacacaacctcccctgcaccaagccccagccccagcaccagcaacagccccagccccagccccagacccagcccagtcaccttggttccctgactttcgttacgggcaaaagatccagggagacagtccacccagaagcagaggagaggtgtccctcaacaatgagacaggaattgcagaggaaatgggacactacctgttcttgaagacaaggccagtcacggtcgcctagcgctccttctaggcaatccacgcacccatgaagggaaacatggagaacaagcaagctttcctgtctgagacacttatgggagcaaagagctccacggtcacgagatctgcccaatcaagcagaaacaggtttggagagagaaacaatcataacagggatctccaggaaatgtctccctgacagactgggaagtcacggactgggaagtccctgatggacagggaagacatgtggccagagagagaggcatctaggacaggggagacagagcaagagggaggacagagcagaaggagcaagagggaggacagagcagaggcaggacagagcaagaagaaggagagagcagaggccggagcccaggcaggaaacagcacggtgccaccgccacaggcataaggggaggggatccaaaagcgtggcttgtccagagaaaccagcgatccagtgacagggattgttgccatctcccattcccggcttcctcttgcagactgtatcgtgctatggcttcatttctcagagaagagccgtgaaaagatacaagcatcttctctgacgtgggtccgctgctctcctgtgggacaaagagctcctgtggggctcttgtcctcagctgcagtgttttcatcttgatgctagaaaagaggctgctcaggatgaggatgagatttcaattgctccaggaccgacgcatctcctcacgtgggccaggccttcacacacccaaagcggatccgcggccgcgaaaacgattgacaaccggcctcatgacccaggcaaagatgcagaaagaggctcaccaaagacaggccgccatgcgagaaaccgctttgtggcacacagggcacattcggccaaagacacacatggacacgggcacacacacacaaacccacagagagagggaaagaaactcacagagattgagagacagagagagaagagagaatgggagacacacacacagacacacagatacacacacacacacacacacacacacacacagacacacacacagagtcatacagcagaggcatgaaaacacacacccccaggcaacccctgaggctgcggggttctgctgtcgaccctctggtgagagagcaccctaggggcacgcattccaacctgtcttcgagatctctgacggcggcacgacttttggggagactcaacccaaccaacaccatcccggcaggcctgaggctgggatgccgtgctgcttccccaggactccgcctggggtttcctcatcctggtcggccctttgcgactcctggcatccggaaaccttcccgtcgaccccgtggagaggtcaggccggagcctcagagccccgacacacaagcactggcacagagggctcctgctttgccgagcctcagagactggtttctaagacaactgtgggaagcactgtgacgggagaagccgctcgcacctcacgcatgcgcattggctgggccgactcgctctccgctcctggcaggcaggctgcgtcctctttaaataatgccaccgctgcgcagcggctggatccgggctccagtttggggcggcgtgggagaggcgaccgcgggtgtcttgtcctgtcccagggccaaacccccaggtgtcctgtccccaggacctccttgagctgacttccaccttgggaggaagggggagcttcaggacgcctgctgtgttctcaggactccccttcagatcccattttggcccactccgagtgagataggatgggctcgccacatctggtgaggcaggcagggcctcgctgcagcacagaatgatcccataggtctcaaggcctagtgtcagctgcaaattcactgatccatcagccctctgcctccctcctcctttgaaagagcagtggcctgcccagcttctaaaagccctggtgctccggaaagcccaccatgctttacaggacacttgcaggcaggaaccagggcaaatccgatgtggagaccatgtgaccacgcgtggcactggcgtatcccacagcagatggtgtgaatgtgtgtcaccggaggcatacggagcgatggcgaaagaaacggtggtgtccaggcatgtgccggtggaagggtggaacgagtgaactttcccacaatgccaaggaaaatcgaagaacacctgggacccggggggtggcagggggcgtgtgcctgacccaagccatgttttcaaatgcctagcagaggagcaaagaggtttctgcaaaattcgccccacctctaaccctccaccaccctggtagccctgacggaacttcggctacactcagccccagccccagccccagcccagtccctttggttccctgacattcgtttcggacagaaggtcatgggagtcagtccacccaggagcagagaagaggatgtccctcaagaatgagacaggaagcgcagaggaaatgcgacaccacctgtcctggaagacaaggccagtcacggtcgcctagcgctctttctaggcaatccacccacccatgaggggaaacgtggagaagaaggaagcttccctgcctgagacatgtatggaagtcaagagctccagggtcatgagacctgcccaatccagcagaaacacgtttggagagagaaacagtcatgacacggatctccaggtagtgtctccctgacggactgggaagtcatctttgctgaagacatttggcgagagcgagaggcatccaggcccctgagaaacaggggaggcagagcgagagggaggagagagcagaggccggagcccaggcagcgtatagcaccgtgccacctccatgggcataaggggaggggttccaaaagcgtggcttttccagagaggccagcgttccagtgacagggattgttgccatctcccattcccggcttcctcttgcagaccgtagcgtggtgtggcttcatttctcagagaagagccgtgaaaagatacaagcatcttctctgacgtgggacctctgctctcctgtcggacaaagagctcctatggggctcttgtcctcggctgcagtgtgttcatcttggtcctaggagagaggccgctcaggatggggatgagatttcaattgctccgggaccgacgcatctcctcacgtgggccaggccttcacacacccaaagcggatccgcggccgtgaaaacgattgacaaccggcctcatgagcaagacagagatgcagaaagaggctcaccaaagacaggccgccatgcaagaaaccgctttgtggcgcacagggcacattcggccaaagacacacacgcactcggtcacacacacacaaacccacagagagagggaaagaaacacacagagactgagaggtagagagagaagacagaatgggagacacacacagagtcatacagcagaggcattgaaacacacacccccacgcaacccctgaggcttcggggttctgctctggatgagaaggaccctcgggtgagagagcagcccaggagcacgcaggccgacctgtcctcgagatcacggcggcacgacttttggggagactcaccccaaccatcaccgtccgggcaggcctgaggctgggatgccgtgctgcttcccccggactccgcctggggtttcctcatcctggtcggccctttgggactcctggcatccggagacgatcccgtcgaccccgtgaagaggtcaggccggagcctcagagccccgacacccaagcactgccaaggagggctcctgctttgccaagcctcggagactggtttctaagacaaccgtgggaaccactgtgatgggagaagaagcccgcgcctcgcgcatgcgcattggctgggcctactcgcgctcagctcctggtagtcaggctgcgtcccctttaaataatgccaccgctgctcagtgaaggcagggctcctgctgcagctgcggcggcggctggatccgtggtccagtttggggcggcatgggagagggggccttaactatactgtccgaaggccaaacccgcaggagtccagtcttcagcaagtcctttacccgacttccactgagggagggggagcttcagagccactgctgggttctcaggctcctcttcagatccgagtttggacccctccgggtgagaaaggatgtgctcagcacatctggtgacgcaggtagggcctcgctgcagcacagaatgatcccatggccctcaaggagtgatgtcagctgaaagttcacttattcgtgagccctctgcctccctcctccgttgaaagagcagtggcgtgccccgcttctaaaagccctggggctcctgcaagcggacaccgctttccaggacaggtgcaaacagggtcggtgcgaatccgaggtggagacaatgcgatcacgcgtggcactggcgtatccctcagtagatggtgtgaatttgtgtcaccggagggatatgttgcgatggcgaaaccaacaatggctccaggcatgtgaccggtggaaaggcggaacaagtggcctttcccttagtgccaaggaaaatcaaagaacatctgggaacaaggaggagtcctgtgcctcagtgcaagccacattttgaaatgcctaccagaggagcaaagagatttctacaacattcactccaccccaaagcctccaccgcccaggtagccctgacgcaacctcccctgcacccagccccaaccccatccaggcccagtgcagttcccttggtttcccgacattcattacagccaaaagattcaggaagtcagtctacctatgtgcagaggagaggacgtccctcatttgtgagacaggacgtgcagaggtaaggggacaccatctgtcctggaagacaaggccagtcatgatcgcctagcgctcattctaggcaatccacccacccacgaggtgaaacaaggagaccaaggaagcttccctgtctgagacaagtatggaagccaagtgttccaggctcatcagacctgcccaatccagcagaaacaggtttggagagagaaagagtcatgacaaggatctccaggaagtttctccctgatggactcggaagtgatcttcgtagaagttattcagccagaccaagaggcaactgggcccctcagaaacaggggagacagggcaagagggaggacagagcagaggccagagcccaggcaggttacagaaccttgccaccaccacgggcataaggggaggggtgcgaaacgcgtgacttatccagagaggccagccttccagggacagtgattgtcaccatctccaattcctggcttcctcttcagaattgtatcgtggtgtggcttcattgctcagagaagagccgtgcaagggtacaaccatcttcttggaggtgggtctgctcctctcctgctggacaatgagctactgtggcattttgtcctgggctggagtgtggtccccttgatcctagaaaagaagccgctcaggatgcggatgagactttgattgctctgggaccgacgcgtctcctcaagtgatcaaggccttcacaaacccaaagtggaaccgccgtgaaaacgatggacaaccggccacaggacccaggcagagatgcagaaggaggctcaccaaacactggccaacattcaaaaaatcgcattttggcgaacagagcacagtcgtccaaagacacacacgcacatgggcatacacacagaaaaacacacacacacagagaccgacagagagagggaaagaaacacacagagggtgagagacagagagagaagagagaatgggagacacacacacacacacacacacacacacacagtcctacagcggtggcacagaaacacacactcccaggcaacccctgaggctaactaatagtggaaaatgtgtatctaagaatacacttggaacagaaatatgaaaaaccgaaagtaagagatattatgaaggatcaaatacaaaatgacccagtgctaaagaggcaacaaagaaaattgtagaagtaaatgacaacaggcattgtgccttaatgagtttgtcctactatataagaaaatacactaggctgggtaatttctgaagaacagaaatgtatttctcacatttccacagggcagaagtccaagatcaaggtgccagcaggattggtgtctggtgagggcctggtctctgcatccaagatggtatcttgtgcactgtgtcttcaggaagagatgcagtgtcctcacatggcagaaggcagaagggcaaaacaggggaagcccactccatccagtccttgtgtaaggacctaaactctttcgtgaagactctcccttcatgactgaatcactacctaaaagcccttcttcctaatcctatggcattggtgattaattttaggggggcacattcagaacatagcaccctatattcaatttcttaaaaattattttgttgttttgcttttgtgtttttcaaatggcttaaagtgcacaaaattggattagtcataatccttagctcatagtataccttggctcctatttcatccttgtttgtgcgtggacgtctgtgtaaatgtatttgaacaatatggtaatcacttgtgaacttacaacacaaccaaagaactagggttctgaccctaatatctgctcttcctctgtcctttttcctgattttcacccttcagcccgagggtaactactaccctgaatttatgtttaggattctcttcctttaaaaaaaacttgttttatggcatacatatgattaccctaaatgacatattatttagtttttaaggatataatttatttacccattctcctattaatttacccattctcctattaatgaacatttggcttatttccagatttttgctattatgaatggcattacatgagcattttttttttttttactacttctggtacatatgggcaagagtttctccagggcctgttgtagaggtattacttttccataacatatgagaatgctcaaacttataagataatccaaattgctttccaaagcagttgttctaatttaaactctcgcctcctgtattagttcgagatgatcttgttgatccacagtctctccataattggtgatatggtttggctgtgtccacacccaaatcccagcttgaattctatctcccagaattcccacgttatgggagggacccagggtgaggtaattgaatcacagagaccagtcttccctgtgctattctcatgatagtgaataagtctcatgagatctgatgggtttatcaggagtttctgctttggcttcctcctcattttctcttgctgctgccatgtaagaaggccttttacctcctgccatgactctgaggtgtcccccaccatgtggcactgtaaatccaattacaattctttctctttacatctctttttcttctcagacttgggtatgtctttttcagcagtgtgaaaacagactaatacagtaaattgatacccgtggtgtggggtgctcctgaaaagatacccaaaaatgtgcaagtgactttgaaacttggtaacaggcagagggtggaacagtttggagggctcagaagaacactggaaaatgtgggaaaatttggaacctcctagaggcttgctgaatgactttgacaaaaatgctgatagtgttttgaacaataaggtccaggctgaggtggtctcagatggagatgaggaacttgttgtgaactggagcaaaggtaactctcgttacgttttagcaaagagaatggcagcattttgcctctgtcctagagatttgtggaactttgaacttgagagagatgatttaggttatctgctggaagaaatttcaaagcagtaaagcattcaagaggtgacttgggtgatgttaaaggcctttggttttataaaggaagcagagcataccgttttggaaaatttgcagcctgacaatgtgatagagaagaaaatcccattttctgaggataaattcaaggtgtttgcagaaatttgcataagtaacaagaagctgaatgttaatcccaaaaacaatggggaaaatgtctacaggacatgtcataggtcatcacagcagcccctcccatcacaaacccagggcctaggaggataaaatggatttctgggctgggccaggttcactgtgctgtgtgtagcctagggccttgtttctctgcatttcagcccctccagccatggctgaaaggggacaacatagaactcaggccatggccttgagagtgcaagccttggcagcttccacattgttttcagcctgcacatgcatagaagtcaagaattgaggtttggaaacctccacctacatttcagaggatgattgaaaacacctggatatccaagcagaagtttgctgcaggggtggtgctctgatggagaacctctgctagggctgtgcagtagggaaatgtggggtcggagtccctacacagagtccctactggggcacttcctagtggagctgtgaggagagggccactctcctccagaccccagaatggtagattcactgacagcttgcaccatgagcctggaaaagctgcgggcactcaacatcagcccatgtaaacagccacgaggtgggctataccctgcaaagccacaggggcagaactacccaaggctgtgggagccgacctcttgcatcagcatgaccttgatgtgaaacatggagtcaaaggagatcattttggagctttaaaatttgactatcttgctggattttggacttgcatgggtcctgtaacccctttcttttggccaattgctcccatttggaacagctgtgtttactcaattatctgtacctccattgtatctaggaagtaactagcttgacctggattttacagggtcataggcagaagagacttgccttgtctcagatgagactttggacagcggatatttgggttaatgctgaaatgagttaagattttgggggactgttgggaaggcatgatcatatttgaagtgtaaggacatgagatttggaggggccaggagcagaatgatgtggtttgtctatgtccctacccacatctcaacttgaattgtattgctcaggattcccatgtgttcagggagggaaccagggggaggtagttgaatctttggggttggtctttcccatgctattcttgtgatagtgaataaatctcacaagatctgatgggttagtggttttgtctttggcttcttttgcctccttctcatattctcttgccactgccatgtaagaagtgctgttcatccaccgccataactctgaggactcctcagccatgtggaatcttaatccaattaagccactttttcttccctgtctcgggtatgtctttatcagcagtgtgaatatagactaatacacttcgtattgtcaaacttcttaatatttgtggagagaatagatgtgtagtatcttgtgcatttccctgattagtaatgaggttgagaaaatttttatgttttgcaggctttcccttttgtgaaatccctattaatgtcttttcccaattttctgttgggttgctatttttaaaattaattcataggagctccttatacttatttgatatgatattaatctttcgtaggttttaggtactgcaaatatcttctctaatttatagtttatcttttgactttttacttttattttttaatttctttttttttttgtttttgagacagagtctggctctgtcattcaggctggagtgcagagtctggctctgtcattcaggctggagtgcagtggctcactgcaacctccacctcccgggttcagaccattctcgtgcctcagcttcccaagtagctgggattacaggtgtctgccactaatgcctggctaatttcttgtatttaatagagatggggtttcaccatgttggccagcctggtctcaaactcctgacctcaggtgatgtactgtcgggattacaggattgagacaccgtgcacagcctatctttccactttttgatgtaaaaagttcttaattttgtgttagtcaaaatgtctaatcttttttaatggttaaatggctttttgtgtctcattcacttacattttctactaaaagttttaaagttttgtttctgacatgtaagtctttgtccatctggaatttaatgtttgtatatagagtgaggcaggaatataatttcattttgtttcttatatcaataaccattatttttctattctatttattgaaaagtcctttctttgcttgctgatctgccatgtcacctacatcacatatcaaagattaaatttgtggagatttgcttgggagctctctattctgtttcattagtcagtttatcagtgaggaccacactgtcttaattgctgtagctttataaaagttctgatatttgccagcacaaatctttcctcttcctcaatgtctttgatattcttggcccttcccttttccatatatatacattttttccatatatatatatatttatatatatatatttatatatatatttatatatatttatatatatatttatatatatatttatatatatatttatatatatatttatatatatatatttatagatatatttatatatatattaatatatatatttatatatatatttatatatatatttatatatatttatatatatttatatatatatatttatatatatatttatatatatataattagagagagagagagaggtatcattttgttgcccaggcttgaggacagtggtgtaatcacagctcacttcagacttgaactcctggactcaggagctcctcctacctcagcctcccaagtaactgggactctaaggcatgcaccaccacatccagctaatttttaaaaaaaatatattttgcaatgatggggatcttgctatgctgcccaggctggtctcaaacttttgaactcaagcaatcctcccacctcaggctcccaaaatgctgggatcacaagagtgagccaccacacctgacttcattttccatattttaagaccatttttaaaaagttgctcaagactgcttttttctcttggtgttacttgcaacccccttacttagccttggaaatactgttagtgaaggaaatctaaagagtcaaaaagtaaaatattctttcttttcttcaaattgcaaaagagcagaaaccctcctgaatcataaagctagttttgataaattggtgaactgagagcatacgcagtattattaattctgttctaatttctgcttcactgtggagtgtcttcacagagtcttaaaagattattgctatgaaatattcttatacatgtaacacataacctctacaattctgcagttgtacttggctgtcttacctaatactcagttgctttgcttcataatatttaaattggcacctctaatttccaaaagacataaatactagtatagatttttagttaagccagaagaaagtagactttatttactaacataacttatatgtaaagttttaataaatctccctgctccttttcttttgcatcataacaaccactgaaaataatatttctatagcagttgggggtaaatgagcaatgacttttgtggccagaggtgaatggcccaggggctcctgcactccaggtcccactgagcctgccacacagctgagggcatcagcatttccacacacctacagtgcacactgtcccagaacacagatccgatgctctcctttattcacatggggagttgagagtattgtcattgtaagtaaattaataaatacatatttatacactgttaaaatctgattggatttgtgtcccttcacaaaacaaattgcttaaatgaaaccacagatttaacataaatgagtacgtttgcttctatgatatgctcttttaaatggaattggaatctaatttgaaatgtgaattaaaagtttaaatattcaactcaattacatttagatttttgttttgttttgttttgagacggagtttagctcttgtcacccaggctggaatgcaatggcacaatctcagctcactgcaaccaccttctcccgggttcaagaaattctgttgcctcaacctcctgagtagctgggattacaggtgcctgccaccatgcccggctaatttttgtattttcagtagagatggggtttcaccatgttggccaggctagtcttgaactcctgacctcacgtgatccacccacctcggcctcccaaagtgctgggattacaggtgtgagccacagccctcggcctttttagattattttactttattttacttatttttatgactttattgcaataaaaatgctagctttttaagaaaatcaatcaatataacaaagaacatagaagatgaacaacaagcattcccacctccatgatctggaaataactgtcatcaatccaaaaactgacacatggtggatcccttcacaccagttcccagtacaaagtaactccttgcttgtagaaaacattattattatcattagtattttcaagacagaatttgagtcttgtagcccaggctggagtgcaatggttcaatctcagctcactgcaacctctgcctcccaggatcaaagtattctcctgcctcagtctcccaagcagctggaattacaggcatgcaccacgatggcttgctaattttttgtatttttagtagagacagggtttcaccatgttggccaggttggtctcgaactcctgacctcaggtgatccacttgcctcaaccttctaaagtgttgggattacaggcatgaaccaccacacctggactggaaaacattattcaatggcaaacagtagcagtgtgcttggggattttagaattgattattttcatatgtctagaaaagttcaatgcattacctcaggctataatcccagggcagagtctcatctgttaatagggggctggtctaagggtccttccagctctcagattaatggtttcccatgatgaactgctccctgccacccatccatccttggttttgtttattcatttgtttgtttttacaggacaaggtctcactatattgcccaggctggtcttgaactccaggccttaagcgatcctccttccttggcctcccaaagtgttagagttacagatgtgagcctttgtgctcagcccatccttggctgttcaagtgtggaggtaaattgtaggtgccaagtttacctccaggtcagaaggggcagaagctccaggaaagaatcataaccctaaccaggcctcccactgcatgaagaccttattttctgaagcttaaacctggacaagggtctgaccagtagcactgtgttcatgaatatcaggtcaaaaatttaaaactgggagtatccagaagaacatggtagatgcaggtgcagtctgcagtccaatggtcagccacaaaaacaggctacctgttccttctctttatcatggagtccttgatataaaaatcgatgacactctcttgcttctggtgtgcttccctttcttcttcattttccgtaagtagttttctccatcccacctcccaacaggccacagtcaattcaggacattttaaccatgaaaatcagtctacataacatgaatttagaggccaggcagggtggcccatgtctgtaatcccagcactctgggaggttgaagtgggagaatggattgagcttaggagtttgagaccagcctgggcaacatggtgaaaccctgtctctaaccaaaaataaatgaataaaaaaaaataagccatgtatggtggtgcatgctactagtccagctactcaggaggctgaggtgggaggattgcttgagtcaaggaggtcaagtctgaagtgggccaagatcatgccactgcaatccagcctgggcaacagagtgagaccttatctcaagagaaaaaaaagatttataggacagactgactctcttattacaagccaatgctcatttgccattccataaatcctagggcaccttgtaagaattatgccaaatctactctacccgtgctctataaatggattcactattgtagatgccactaagaacattcatgattcaccagaggaggtaaaaataacagcattaataggagtttggaagaagttcattccaaccctcataaatgactttgaggggttcaagactttagcagaggaagtaaccacagttgtggtgaagatagcaagagaagtagtattacaagtggagcctgaagatgtgagtgaactgcagcaatatatatatatattttttgagatggatttttgctcttgttgcccaggctggagtgcaatggtgcgatctcagctcactgcaacctccgcctcctggtttcaagcgattctcctgcctcagcctctcgagtagctggtattgtaggcatgtgccacaacacttggctaattttgtatttttagtagagacagagtttcaccatgttggtcaggctggtctcgaactcccaacgtcagatgatctactcacctcagcctacaaaagtggtgggattacaggcatgagccaccacacctggccaaattgctgcaatcttaatggatgaagagttgcttattatgaatgagcaaagaaagtggtttcttgggatggaatctactcctggtgaagatgccgtgaacattgtggaaaggacaacaaaggacttagaatattccataaacttagttgatagaggagtggcaggttttgagaggataggttccagttttgttataaattctactgtgggtaaaatgctaccaaactgtacagcatgctaccgtgaaatcttttgtgaaagcaagagtcagtcaatgccgcaaactgcattgtcatgttattttaagatattcccacaccctctccagccctcagcaactatcaccctgatcagtcagtagctatcaacactgagtcaagaccatccaccagcaaaatgatgatgacttgctgaaggcccagatgatggttagcattttttggcaatcaagtattttcaaaataaggtatatacattatatttcagacataatgctattgcacacttcattgactacagtagtttaaacataactttttttttgagatggagtctcactctgttgcccaggttggagtgcagtggtgtgatcttgtctcactgcaaactctgcctcccaggttcaaacaattctcctgcctcagcctcttgagtagttaggaatacaggtgcttaccaccatttttgtattttcacagggttttcccatgttgaccaggctggtctcgaacttctgacctctggtgatccacccgcctcagcctcccaatgtgctgtgattacaggcatgagccaccatgcctggcaacataacttttatatgcaccagaaagcaaagaatttcttgtgacttgcaaaaaatttcatgtgacttgctctattgtgatattcaccttattgtggtgacctagaaccaaacctgcaatatctccaaggtgtgcctgtacccctgaaagcagagctggagaaaagacttgggtgtggatagtttatttgggaagtgattccaagaagcaagagtgagatgtgggaagagtgaaccaggcaagaaaataaagccaaaataatggcatgctactgaggctgctcccatgcactttttttctgcaggactttccgagaggctctggaaagttatccaggactgtccacctgaaacatgagcctcgagcatttgcccacctgtcccacactggttgaggtcttcccctgaggctgttaacctgcaagtgtttctgggctgtatttgtgctcaggcaaaatcctacaatagtggagacgtcccggggcggaaagtgtagcttgagtttgctggcagcacaaaggaagcctgtgcttcagtggaactccccacggtggctgagactcaatgaaaggtgtgctgagaagacatgacgcagtcgtcattgcacggaggaatcgtagccatcgatcttggcaagaggaccaccgccctgaatcctgcgcttgagaaggtgcctctctgtctgggcactcaggcccctggccaaatgtgcctgaccctgcatggcctctttcctgggtccatttcaaagtgcaaactgtgtttgtccaaatggtgcccaaggctctgctgtctgaaggggtgagaattgtgtatggagcttgcatgaggcctagggagttccccacacaggggtatgcaaggcttctcaagtaaggaaagggatagctatgacgaaagaaaaaagtttagcctggggttgaggatcagctctccctttactaccacattcccatgcagagcaccaagaaatcagagaattctacactcgactttgaccttgtgggttattatggcagtatatttattgaagtagaagaatagaatgtatttagctattttttagcttcatttataattcatcattatttagacataatgcaaatgtgggctggaattcatgttctgatttttgtggccttgagctaaggaaaagggacccaggaaatgggctttatgtgttggatggcttcatggaatccccaacttcattagcttctatgatgactcaagattgttactaaaatccacttttaattatctttaaaaaccaagggatattatgtagctcagcggttagatggcacttgactcaaaatatctatgaagcaaaggatataaatgactaagagcaggaggatcattacctgaaggggtggagagttgatctcaggttatgacctgagagatccttcctgctggctcagtgctgactgaacgtggggcaggagagccccaggagcaacacgtatctgggataggagggaatgctgggaggaaggaaagggaaataagccctttttgtttttattgatacatgacaattataattatttctagggtacacgtgatattctgatacatgcatacaatgtgtagtcatcaaatcaagataatttgcatttccatcacctcaaacatttatcatttatttgtgttaggaaaattccacatctttcctctagccattttgaaatgtataataagttattgttaacgatcatcaccctactgtactattgaacactagaacttcttctgttctttccatctaactgtatttttgtgcccattaaccaacttctgggaagggtaaaagagtgggtggatgaaaagggcccttcttaatgcaaagaaaaccttacaagaaggaaagacatcttaggaggagaaataaaaaggtggaccctggacttagagtagggactgcagaaattgaatggcaaagaaaaaaccaacttagcaatgtaaaaataaatctcaatgtcattcctttcacaggtccaatgtctgatattcttttggcaagctggatatgaagtaggaatctttctttgagtcatacattttcatgattatgattgttattgaataatagctgacaattgttgagagcaattattgaggacaattgagctttcacaagctcttttcaaaggactttacatatatttctccacttctaactgttagatattcttattattcccattttgtagatgagggatgcacaggcataaagcctatgtggaggcagagagcagctaagtaacctgaccatggcccaacagcaaacaaatgatggggccacatgcaaatccaggagaacccctctattatatgaagctcaatgttttcttgtttgaatcttgttatgaatacacctatttgcaaaggggttttgaagctacattaaaatattctgtggttgtgcgcggtggctgatgcctataatcccagcattttgggagaccaaagtgggcagattgcctgagctcaggagtttgagaccagcctggccaacatggtgaaaccctgtgtctactaaaaatacaaaaaaaaaaaaaaaaaatagctgggcgtgttattgtgcacctgtaatcccagctactctggaggctgaggcaggagaatcgcttgaacccgggagaggaaggttgcagtaagccgagatcgtgccaccccactccaacctgggtgacagagtgagactctgtctctaaataaataaataaataaataagattgaatttcgagcccctgaccatgtccccagattgtactcatatgtattttgatgtcttctaagatttattcttagtgcattttttaagttaaagtatttactgagcatctactgtacatcacgtgctgagataggcatcagcggtgcagggaacatatggcacagtctctgccctcaagtaactttcactcaccacatatatttattaggacaccgatacatgtgtgaatataagatattaggatagacattgcaacaaataattatttactgtaaacctatttcataggattttaatcttaaagtactttcaacctatttccaaaaaatatgtattgcataactttaaagggattcttagtttgaaatcaccatatgaactgcagtagcatctgctggtgaaatactgctttgtgtctattagaattgtccaaacaattgggagagaactgcattattagagctgtaaaagttactgtctagtaatctcagaaaagaagaggaagttctatggtagatgaataagatgacatctaaactgttctcttaagctactgaagttctgtggacatctcacagcacaaagttcaaatgtatgcccacaaatcctcatgccacaagatgtgacacctttccaatctctttttgcaaaactttccaattctgtctcttgtaagagtactttctatacccacatattctggattttgtggtgcacacaaagacaagatgggaagggggcttccatttgttgatgccagctgctctatggaccaggccctgcccatgcatccttgttggttcttttatccctacatcagccatagcccataggcattaacctccattgtacagatgaagaaattgaaactctaagagaatatgcaatttacccagagtcatgcagcttgtgtatgtaagagttggaatgaaaatccaatctgagaatgcagtaaactatcgcaagaacaaaaaaccaaacaccgcatattttcactcataggtgggaattgaacaatgagaatatgtggacacaggaaggggaacatcacactctagggactgttgtggtgtcgggggagggggtgggatagctttgggagatatacctaatgctagatgacgagttagtgggtgcagcgcaccagcatggcacatgtctacttatgtaactaacctgaagattgtgaacatgtaccctaaagcttaaagtataataataaaaaaaagaacaaaaaagaaaatacaatctgagtctcaagtccccttccacaatatggtatccatttcattttgcaatcaccttagctgggatatatgtctgccctaaaagatagtaagtaggaatacttgtctctataccttaacctaacatccatgggcttcgtttttgtatttggaggtgtcataacattataataatttgattttatttgaatagtgagtattatactactcagtctagagatctgtgacatcccagtctaaactggatgatagcaatgaagtttcttcaaggagacaagtatgagtaataaggtagaaataagttgaatttttatggagttgctatttctgaatttaaagctagctgaggttaagtagatattcaaaaagatcactataatcttcacttgaataatacaaacatttattattttctacctgtttatttatggaacaaagatgcaattttaaaacagaatatttgcaaattgtattaaaatatattaaaaacataatacattatcacccaatagggttgttcacagtaactcagtgttagtttaaaatgtgaaattcaatcaatataattcaccatagaatatagtgtgtatgtcagtataatgtatatcaacattggaaagaagtaaatttatctttgttttttagtaagatgagattaaaattttaggaaatttcaactttcattttagattccggagggtacctgtgcaggtttattacatgggtgtattatgtgatgctgagatttgcggtatgaatgaaggtgtgagtgcctgtcttgaatttgcacccagagcaatctcccctgatcagcagagggtaaactaacttgaattacacttgaatttcttagtagagcatgtcacaaagggcaaattgtggtccagagacaaaagtgtccaacggtctaaaatgagcctgccatatcacttagggtacaggtcttaagacaaatacatttcagaaaggggtcaaacccttgtttaaagacaaatgtaagctggctgtggaggcacacgtctgtagttccagctactcaggaggctgaggcaggaggatcccttgagttcaggagtttaagatcagcctggacaacataggaagatcccatctcaatttttaaaaatgagaaaaaaatagataaacttaagcatattaaaattttaaagagtttcttaagcaaacagagattcatggatcagccagctccaaactgaaagtggttggaggatctactggaggcgtttgtagggaaggcttttatagggtgaatgtagaagtagagaaattatttgtttggcaaaaatttgggcagttgcattatttgaactatcctggtggtaggtctctcattacacagctaatactcagcgggccacttggtgggctaaggttgtttcattttgtctatgtaggaacccaggccatgggagctatctcagcctaatgctctcccattacgttattttacacctctctgtatcagggtaagcggggatcttccccacgaggcttcttaccaccctgtttccctcagcaaaatgaaactgtcccttttgcctctgtaggcaatcttctgaacagggctttcctaatattcttagctcatcttattttatcttatcctcttctctgtaccctgtttacatgcttctggaacacttgtgtgtcttgcacacatcccctgcattatttaggcaatcctaaaagaagaccactaggatggattggtagagaactgctggcatattgagccctctctccttgtatctggaactttcataattacctttgttctccagaccaattttgcaattatcttcattctccacttcaaaatacatttacctctgacagaagctgagcacataaaagggaccttgtccagtggtacatatgaggcaggagacatgatatagttaaaattataaactaaaagctttctgacaccaaaagcataagtaacaaaagaaaaaaataagtaaattggacttcaccaaaatttaaaacttttgtgcaatcagaggacaactggcagaatggaagaaaatatttcaaaatatatctttgataagggatcaatatgcagaatatataaagaattcttacaactcaacaattaataaacaacccaattaaaaagtaggcaaaggacttacatagagaatttcccaaaaaagatatacaagtggccatcaagcacatgaaagatgctcaacatgactgattactaaggaaatgcaaatcaaaaccatagtaagatatcacttcatacatattaagatggcaatcatcaaaaaagcagggaataacaaatgttggtgaggatgtaaacaagtcgaaactcttgtacattgcccgtggactctacagcgatatagtcatggtggaaaagagtacagtggttcctaaattaaaaacaaatggaacataggctgggctcagtggctcatgcctgttatcccagcactttaggacaccgaggcagccagatcacgaggtcaggagttcaagaccagcctgaccaacgtgttgaaaccttgtctcaactaaaaatacaaaaattagttgggcgtggttctgtgtgccggtaatcccagctactcaggaggctaaggcagcagaatcattggaatctgggagatagaggttgccgtgagccatgagagtcagactccatctcaaaaataaataaataaatgaataaataaataaataaatacaaatgaaacatagaattactatgtcagtcagcaagtccacttctgggtttaaacccacaaaaattgaaagcagggacttcaacagatatttgtaaattcatgtgtatagcaacattattcatgacagccaaaaggtggaagcattcattgacagaggaatggataaacaaaatgtggtatagatatacagtggaatactacttagacttaaaaagggacattctgtggaatgtggcttgaaaaccacttctgtaaggtgttgtgtaaatgtacaaaatccaaaccagggtaataacctcaaaatataaaatttaacttataatattaagaccctgataaatttcactctctgcttcatagcaaataatttgttttgaatgcaggtatattttgttaagtagaaaactgtgcactaaaatatagtgcttaaaccaaaatcctatgtataaaaccacatattttctattgatttgcattttttaaatgtaaaaatggattcacatttctgtgtgtaaaatgccagactcaaaatacttttactgctatgattccatgtcttatttactgaggaggcaaaccatactaacccagaatcatggtattgtgaccatccattttaaatataattgcctctactatttctaagtccctgttctgcaaccctgtggctcttttaaatttgagaaacagttttgatgggccctgtattgagtattattatttcccagaggtactattaatagtttatggccagaccatccatccctgagtttccattaaaagaaagagggtctatggcactgtaactttttcccaccattgaccatctgcccttgctcctcaggagctccccgtgcctccctgtgtatgtctatccctgcaaatgccaaggatatggaataagtgagcctactgcccctgtggcactgcagggggactccttggtgaagtgtctacatctatctgatgtctcctcacttcttcaatctgctcgctaatgtagaattaggtcaggcacaagctatcacaaaaaaaaaaggaaacatagagtgtttgatgtccacaaatgtattcactgtaggtaacttagaaatacatatgcacaaaatccaaaccaaatatacaccctaaatatcaccactagaaacaactattttggaatacttatagtactctcattattattttaattagtcatttgtgatctcttttacttaaaacgtaaaaactgagtactaaatgattttttaagatacgcaactggtagaaaaacctaatctactattttcacaaaacttcaacacaataaacacttattacaaaagtggaagcattccctttgaaaactggcacaagacaaggatgccctctctcaccactcctattcagcatagaattggaagttctgtccagggcaatcaggcaagagaaagaaataaaaggtatccaataggaagagaggaagtcaaattgcctctgtttgcagatgacatgactgtatatgtagaaaaccccatcgtctcagacccaaaactctttaagttgcaaagtatcaggatgcaaaatcaaagtgaaaaaatcacatgtattcatatacaccaataatagacaagcagagagccaaataatgagccaattcccatttacaattgctacaaagaataaactaccaaggaatagaacttacaagggacgtgaaggacctcttcaaggagaactacaaaccactgctcaagaaaataacacaggaaacaaacaaatggaaaaaaaaagtccatactcatggataggaagaatcaatataatgaaaatggccatactgctcaatgtaatttatagattcaatgctattcctatcaagctactattgactttcttcacagaattagaaaaaaaaaaaaactttaaattccatatggaaccaaaaaagagtccatatagccaagataatcctaagcaaaaagaacaaagttggaggcatcacgctacctgacttcaaaccgtactgcaaggctatggtaacgaaaacagcatggttttggtacctaacaaatatatagaccaatgaaacagaacagagaccccaaaaataataccacacatgtacaaccatctggtcttccacaaacctgacaaaagcaagcaacagagaaaggattccctatttcataagtggtgctgagaaaactggctagccatatgcagaaaacagaaactgggccccttccttacatcttatacaaaaattaactcaagacatattaaagacttaaaaccaaaaaaaccctagaagaaagcctagccaataccattcaggatgtagggatgagcagactatgactaaaacaccaaaagcaattgcaacaaaagccaaaattgacaaatggaatctaattaaactaaaaagcttatgcacagcaaaagaaactaccatcagtgtgaactggcaacctaaagaatgggagaacatttctgtgatctacccattggacaaaggtctaatatccagaatctacaaggaacttaaacaaatttacaagaaaaaaacaatcccatcaaaatgtgggtgaaggatataagcagacccttctcaaaagaagacattgagggccgggcatggtgactcacacctataatcccagcactttgggaggccggggtgggtggatcacctgaggtcaggagttcaagaccagcctggctaacatggtgaaaccctgtttcaactaaaaatacaaaaaattagctggacatggtgatgcatgcctgtaatcccagctacttgggaggctgaggcaggagaatcacttgaacccaggaggcggaggttgcagtgagccgagatcgtgctgttaactgctccagcttgggcaacaagagcaaaaatccaactcaaaaaagaaaagggcatttatgcagtcaacaaacttatgaaaaaacactcatcatcactggtcattagagaaatacaaatcaaaaccacagtgagataccatctcatgccagttagaatgatgattattaaaatgtcaagaaacaacagattctggcaaggctgtggagaaataggaatgcttttacactgttggtgggaatgtaaattagttccaccattgtggaagacagtgtggcaattcctcaagtatctagagccagaaacactatttcacccagccatctcattatggggtatatacccaatagattataaatcattctactataaagacacattcacacatatgtttattgcagcactatttacaatatcaaatattggaaccaatccaaatgtccatcaatgatagtctggataaagaaaatgtggcatgtatacaccatggaatactatgcagccataaaaaagaacgagttcatgtcttttgcagggacatggatgaagttggaagccaccattctcagcaaactaacacaggaacagaaaaacaaacactgcattttctcattcattaatgggagttgaacaatgagaacacatggacacatggaggggaatatctcacaccagggcctgtcggggggtgtggagcaagaggcgggagagcattagaataaatacctaatgcatgtgtggcttaaaacctagatgatgggttgataggtgcagcaaaccaccatggcacatgtgtacctatgtaacaaacctgcatgttctgtacatgttctgtcccagaacttaaagaaaaaaaataaaagagagaaaatctcttaaaacttcatagaatctctatctttattaatacagtcagcatacaataaggtaatcataaaagtatcatgagaaataaaatttcatgaaagcatatgtttgtagaaatagctcgtttcaggaaaaacatagtcttatttttaaaaaattgtctcataatattttatggcataaaatatcttcttttctgccagccatgtatatctttacagaatacacatagtaatcaactaataggcaatcctcatcaggatcaatgaaaatcaattgttaaagtaatataaattaatatacatttataagggaatttccatgaattatcttttggaccaaaaaactatctagtctgtaaatggatcaggtgtagtgcatttacagggtaggtactgaggccggaaatattcaagagagagattcggacttcagaaagacgaacttgagagagttagctgcagagcaaaagcactaattcaggactggtggaataggatagcatagaaaagacatggggaagaagagaatatttgtttccatgcatgcatgtattgatacaagcaagcttccatcaaaaaatgactttcttctaaaggtccatatggcataaacattaacacttttcctttactgcctcacagatcagcttttcttccaaagattctctttctggaaaagtaaagtccagaaagagaaatatttaattgttatagtcataaaaattataattagtcactaatgctgcagtcagggtagaagagagagaagttccaactttagccatactttcatcaagttttccttctacttttaaagacaagcatacaggaatgaaagtgagtgttgttattctggagaaattctcttaaatttatgaaagaacaaattactcataattatgagattttgtaatcagtaatacatttcttattatagtttttatcactgtgcgtcaactgagaaggttgagactttctgctcaacatgataccatattacagtcatgcaccacataacaatgtttcgtcaacgacagacttgtatatacgatggtagacccatacgactatcttactgtattttactgtaccttttctatgttgatgtttgcttagaaacacaaatatctaccattgtgttacaattgcctacagtattgagtaaagtaacatgctataaagttttgtagcctaggagcaataggctataccatattgcctagttgtgtagtagagggctgcagtttaggttagtgtaagtacactctatgatgtttgcaggaaaatgaaattgcccaacaacgcatttttcagaaagtatctctgttattaagtgatgcatgattttattccccctcccttcttactcacctgactcctcattttttcataccttgcttaactcatcatttgtcaattctagccagttcttactcctctgcagtgtatttaacattcatcctttcactatcatttccattgtcatgtctcatatttctattctctgtcatctagaaaattccaaagtttccatgacatggcacattggggcctgagaatatttatatgtacattttccacttctattgcactctgtcatgaaattcaataaccacagtagttccttgttcaaaagccaccaatagctttaaagcacttatctaaaagtgttcaagtagcctggtcaaatatcaacatagcttacagggatttcactcttattctacataaaggttatgatttaatctggacatatcatgttctttcctgattcttatcagaccatttcttctgtcctctgaaatatagatttcatgtggccggaaaatttttcttttttgttctctgctatactcacggtccctaatgatgtgcaaatattaatagtgagaattttttaatgaattggttcataaatatatgaatatttcaaatagttttgtcccattttttaacctctggaaatcccccactttttatttttgaatgccgttgaccacagtgagtggtttggtctcatcataagggaagatggatcagaatgagtaagaattctttgatgagtttcaggaaagtggaaagatgtcctgttattgtttattcaacaaatgcttactgactaactcctgtgttcaaggacctgattctgttgtttctatctttaaagccttcaaaatctagaacttgagatagaaagaaaacctacttaggacacgttgtttatttcaatattttgatattaatcataaaataaaatgaaaaaacacagaagtcagttattttatttacttgaatacattggagaatctctgaataggtcacttagaagccagatttgaagaacgagttgaaatttactggagacagaaatagaggaagggaacagttagaagatagcccatgagtggaattaagaattttcagaccagttgtggtggctcatgcctgtaatttcagtactttgggaggctaaggtgggaagatcacttgaggtcaggaggtcaagaccagcctggttaacagagtgagacctcatctctacaaaaatgaaaagcaaaaaattagctgggtgtgactgcacacccttgtagtccaagttattctagaggctgaggtgggagggttgtttgaatccaggagttcaaggctgtagggaaccatgattacactactgtattcccccaggctaggagatagaacacaaccctgtctcttaaaaaaatatgactttgaaacattatgataaagtcctgaaagtgctcttagttgcccatccgtttgcacaatggaatagcatgtgctgtgataacagaagtgtagggtgccatgagagccaattggaagattatcgtacctggattacaggaagaaataagggaaagcaacaaggaggatcagggaatgtagaagctgacacattgcaggtgactcaaacgtaagtgggagaagaaagaataggtaaaggtctacctaaaaaaaaagaaaataaacagcatcaaatttaagaatttataaaaatttatttaaaaaagcaagatatatgagggtaacaataacaataaaatcataaatcataaaaaatataattgcaaaatcctgactggcttgtttaaaaaagaaacgataagaaaatagataagtttcaataaaatttaattgagacaaagtacacatttaaaaattagaaataaagcatataacaacagatgtgaaggtatttaaagttgatactatgatatattaatattttaagtcttaataaaatagataatttaactttattaggtgaatacagcaataacaaagtagtatatactaaaaaagagtaacttttctccaaaaaaacctttacaagcaatggacttatagatttccttcaataatcaagaaatgtgaaatgtcaacaaaatgtccaatgacatagaaaaatgggtgggaaacaaatttttaacaaaacttttgtaaatctgatacataatctgataatggcaacagtgaagaaaatcacagaacttctttcagataaacatatggaaaatcttagaaaaacttaccaatatgttaatagaaagtaatatgaaaatcagaataaatatcataaagttattgaacaaaactcaagagtgatttctgattaaaaagaaaaatacagttatagggaaaagtggaattactaacacctgactaatatattaaggatgccaatctaaaatttgctaatagcatcatatttacaaaatcataactattaacatgagaaggaatgtaagatttaataattagcattatattacaattctgggaattctgatcaatgcaataaaatatcaagcagaaataactaattcaaaagaggtgataacatattatttacaaatattacaagtataaggaaccttaaaatgatcattttctataatttattatagtaaattgtttaagtctaccttaggaaaataacactaagagaaaatgttaacaaaaatatctttggagttatttatgttaacaaaatttggaaaagcctaaatatttagctagaaggaaatggtacattgatatagactggcattaaacttagtttcttgatttgattaaacttagtttctatgagacatttgtatcattcaaagttgtatgtatagacactgactgaaacacaaagtgggttataatattgaatatgtaatataatggcaaccatgaagaaaatatcagagaaccaaatggaaggaaaagagcagaacctgaataatgattacctttggacagtgggatcttagttccttttcctcttcctactaatttaaaatttgcaaatttattaccttgagaatatgagaatacattatacttataattagaaaacataaaatgagtgctaaataaacaatataccaaattctgtttagaattcacttccccaagaaactttcctggattaatcccactggcattgatcattattttatatggcactctcatacttatgtattcagtttctaccatattattttgcatgttttaaaaagtcaatttataagcataattatggcatttctacatttatatagtgtagtctccaaactgaattataagcttgaggatatgaggaaccacagtgtatttccaactatatttatacaataaatcatgtggtacttttcacagagtgaatgttgttaacttactgaacacctgatgaaacatgggaaagacggcaatgtctgacaagaggaacagacgtgaaataaaacccaacattctgtataattcttattgtctcttaaccctacttgttgaattatgaaaactacatatacaaaaatttgagcattatactctttagctgtacattatcatttcaaagcaaacttatacatggctctcactattacaataatcttcctactgtaaaaacttttaagctgtaactttctgccattactacattaccttcatattaatttatgccatacttctttctgaatttctgtcaatattcatctgaagtatttttgtgtaaaaattagatagtaacaggaaaatagataactgcttctaataggtagaagtcattaatacagctttgcctattaacacatacacactatttcttcatgtcccagatgttcaggtatatgggaatgaaacaaattaatgagttggaacctcttgattcagttattctggtgacaaataatctgtatagctcatggacgattgttttacccttgacaaagtggctgcaattgttacttacagatgtagccacatttaatttcttttctccactccccactgcattgtatttgttattcttgatatgagaaatgtgttaagaaacatgccactaactgcatgtgctccccatacaattagctacagaaataagtgataactcatattatttacaaatattacaagtataaaccttaaaataatcattttctataatttgttatcaattgttaagtttattttaacaattatcaattagctacagaacacgagtagtgtttcttactttagccagatgtaaacatgtgatgtggtaatatagtgaagaatattattcacttcaggggatagggctttggtcaagaattttgagaaactcttgaaaaaggaaaagaaaatcccccatgatagtaatacaattccaaaagcaaaaggagaaaaaatgtaaatgtattaaatcaaaaaatgttttaaggtaaggcaaaagtaggtatagaatggtgagtcacatacaaattgtgaaagtgagtaatgacccagaaatcaaaggagagggaaaaatatggtaggtgaatatggttgcaatgctaattaaaaaatgttattagcagctagctcaattcaagttttgaataaatagaaatagagtgtttataatggtacacttaatctactggtgacaatattaagataattgttgaaatatacttaaaagaagttagtgaaagcagagaatgaaagactattgaacttttctggtctgttgtgtaaaaatttgcctatatccaacatacaggcacaaaaataaaatactggaaatagagagcaaatcttggccattcaaatgagagtcagctattaattctttggccataggctatattcctacaagcgaactttggctaaaatatgcgattcaatacagatactcatttttcaagggtttacaacctgtttgagtccatttggactgctgtaacaaattaccttagactgggtaacttataaaccaaatttattattctcagttctgggggttgggaagcccaagatctaggtgccagcacagttgttacctggtgaggtttgtttctcaaacttactgctacatcttcacatggcataagggaaaaaggggtaaagtagctccctatgggttcttttataaggggactaacccattcatgacagctcccctacccccttaacctactcacatcccaaagacctcccctctttatttatttatttatttatttatttatttatttatttatttatttattgagatggagtcttgctctgttgcccaggctggagtgcagtggcacaatctcagctcactgcaacctctgcttcccaggttcaagcaattctcctgcctcagcctcccaagtagctgggattacaggcatgtgccaccacagctggctaatttttgtatttttagtagagatggggttttaccatgttggccaggctgctcttgaactcctgaccttgtgatctgtccactttggcctcccaaagtgctgggattacaggtatgagccactgtgtccagcctggcctcacatcttaacaccaacatattgggaattagatttcaatatataaattttggagagatataaactttcagcccacagcacaaaccaaggatgaatgtttgaggcacctgtcaaaatacacatttgaaaagatcagaaagtctgcaatgccaaatgaattacattagtagaggcaaattctaacaatgaaattagaagaactgcaaacagaaagaatcacagagagaaccatttaattttaacattgaggaaaaactttgaatgtgggttccattcaattgtacaacaactcaatgtatacagcatcaacacttttaaaacattgagataaaatatttttgattttatcaaatttgatgtaatgctagaagaagaattcatactttgaagggactgtgataaatttaaggatttatttagttctgtttgcacttgctacatgctgtttccaatatgaatattttcacaagatttacatgtctaatacatgagttggctcctgaccttgaagcaattggtagtaatagatacactggtaaaaaaaaaaaataggacttctgctgtcctgcatgaccatggacatggacatcttagtatttatgcataataaaaactttcagttcagcttagtaaatatttattgacaatgtgctaatcatgaggaggactgtggataaaggtggatgataaagataaatttaagttgggaaaactaccagcactacatctacaagggctgaaagtatatacaagtcagaagcacacagaaatcactgaaccacaaagtaaatggccataagtgctgttatatacccaaaccatgtcctacttatatagtcctttaaatggataaataatacattaattctgactgggaagggagaaagtttctaggaatagttctttaaaaagttgcatcagttttgaataatacatagaaagagactgttacagaagaacagctagctaacggaagacctagcataattttattcttgcacaatatcagggaacccaacagttttgtcagcagtagctacttttaatttctttggatacttgagatcatctggtaagatagtggtaagtaaggttgctgatgaagactttgattaagaaaggatttatcaggagctgggcacagtcgctcatgcctgtaatcccagccatgtaggaggatgaggcaggaagactgcttaagtccaggaattagagattaacctgggcaatatagccagaccaccttctctaccaaaaaataaaagacaattagatgggcattgtggcacatgcctgtggccccagctattggggagactgaggtaaaaagatcacttgggcccaggagtttgaggctacaataagctatgattttgatggcagcggctgctgccatcatgccagctgcaagggagaagtgtggctggggttgtatgctccctggagttggcaggatggggacaagtgggagccctgccccttctgagttggaatgggagctccctgggtgctgctgcagctgcccaaagtgcagctgtagctgtagacctggacctcccactccatggagcagacaggagtttatccatctcccctgctctgtccccaccccagcccaccacccagccacccaaaccaatgctgcagactcaggcaaccctgcactcttggggaggctgggaacgccccccttgccccttgcaggcttggaggcacctcctcctgctgcctggcctctcccacctcctggctctgtgctctgatctcagagtggggttgggacccagcagggtgctgtcacagcccagccaagtgtgcacacattggaagcagtgctgacatgcccgttccctgccacctcagccccctctggactttggacaccgaggagcaggagcatgagaggggaagctgagggggtctgagggtggctgggcactggcctgcaagtgccccttgatgccagcagcctgggtgccatggatggctgtcggagtcagacaggctcctgtgtggaagcggatgggtccccagtgaaaccccacctgcaggctaggctgccagtcctgcagactggaggcaaatctcatggtgctttttcctgggcccccccatggctgcccatggaccaatgggcatacacttcctcccctctgacatccataaaagcccaggactcagccagaacagggcagaagacagaggagggaagactagaggcaggaaggagttatcctttctgctgatagctggagacaatgggagggccagctactttctctgctgaatgcttcagagacctgcagagatgtctgggaaccaccagctgcagacaggagcaaccctctccagggattccctttctgctgagagctgaacacttgacagaacaacctagagaggagctacccactatggatctcctctgagctgttctaacacttaataaagctcctctcctttaaaccttcacttgtctacctacacaattcttcctggatgcaggacaagaactcaggcaaagatgtcaccaaccacagttttccaaccagaaaatcgacaccccaaagattctgtaacaattgcaccactgcactccagcctaggtgacagagtgataccctgactcttaaaaaaagaaaaaaaaggaattatccacaagttattagataagactgctaatagcttctaattgcgataccttcccgtttgaaatggaagggatggaagttaacaccaggtcagttttccaaaagttataactctgcttttggcctctttcagctccagtcagacattagcaatgctcagttaccttcaatattaagccggtcctgacatgaaactggcagcatttgagaacactgacccagacttgaaggtagatctggaattaggattgctgctttaagcccagtatcaagttatacaatgaatcatgaatttctcataaaccaaatttagtggatttttttcctatatttctgatgataactttgccttgattatatatttaaacaattcatttgctgtatcttcattactgtcccaaatgttttgggttggcatactgatgttagctagtggttttggtctcaagtttcagtagctgctccaatgtaaaatgaacacacataaatcttaggtttttactcatatgataccttgtctgacactatcttcgtctatcaaataaagggtttagtattttcttagtcaatgtgggctgctctaacagaaaacacagattgagtggctaaaacaacaatttgtttttcacagatctgtaggctgtaaatctgaaatcagggagtcagcatggttgggttcttggtgaaggctgtcttcctgacttacagatggctgtcttattttatcctcacacggaggagagaaaactctcttgtatatcttcttagaagggcaatagtttcctttgatgagggtttcctcttcatgacctaattacctcccaaaggtttacctcctaataccaatacattgagagttaggatttcaatgtatgaatttgagggatttgcagttcataataactatcaatgtcaactcagttcaagcttgaatttgttttgctttgggtgacaaatctctaactaatttgaattcatctttccccagtctggttcagtgttgtcttctttctccttcaccaccaacagttagcaagatgtcagatttacttgaggctaagtctgttttagttatcacaatagagaaccctgtaagctatatcttagttgcccctttcataatatttttcattatggaaaaaatacattctaaacattgttcctattctacgaaacttggctgcatctttgcaacaaaaataatgtggacatttgccaaatacagctgtagagaaaggtaaaatcattgctctgaattattcataaaatcacagaaattagggacaaacactaagtaaggatgaattattcagtgacttgaaacagatattttctttattttctcaagtaatttgaaatgtactgcaatttacatcctcagtgttataaatatatgatgtttctcttttagtgaaaagcacccaacagtacttgttaaacaaatgagtttttttctcttcccatctctaaaagcatttttatacctacacatctacaaatatgttttaatagacctaacctctctatgatgtcattttccccttgggtaccggaatatatatttagtcctgtagaattatttagctctcagttgctgagttactatttcccaggagttgcattgcccaaagtaatgtggacatttttctcattttaaatttcacctcacatggtcctttggttttgttacattttgtacctgttttgattggttttttttcctctctatggaaattatttgccaagtaaggagaaaaactgttgatgtttttccttattcaaaaattatggtagatgaaaaaaatcggattaaataactctattacagtctttctcaactttttactaagataaacatgaaggcactgaaaaggtgaaattttcagctattgaaaatttggaatgtaggacatcatgccgagatttgaggaaacgtatcaataatttagcaatggatggtagtagatacacaaaaagcaattagaagcaaaaaggccttggattcttttcatgttaaagaaaatacattctgaaagtaagtacaaagaccctttgtatttactttataacctgttccctaacagaataccagggcctatgccaagggaaaaactgtgtagaagtgtttttctcttctggtgctgatatggtcataggatggggatgctcgctctttgctatttctctaaccaatcttattactatatcaattaataacaaaacatttcaagtctagttactgacaagagagtaaactagagtagactcctgactcataacaaggattcagatctagagttctcatagagtgaagagattatgtttgcaactgggaaacgaatgtaaaaactgtatggaatccctggagagtctgaaagtccctgagcccggatacagagagcaaatggcagtttaaggctgaccacctctcattccctccactatttctcacataagaatattacagtacactcttcactgctctctctgcttcaagctttgcccttccacctctctattccacagagaaggtagaatgctcctcttaaaatacaaggtggattattttactcatctgcttaaaaacttttcaatggcttttcatctcattctgaataaaattcaaagtgctttccaggcttacaagtccctgtatgatcctgagccttgaaaatatctctgacaaaatctgcagcctcccattggtcattccttctctgtcacactagtgtccttgctgctgttttgaaatatagaaagcatgattttacttcagtgtctttatccttgttattttctctgcctgccttctgtgtcttgggcattccatatgactcatctcctcattccccttagtcatttttccatgtggcatttgaatacagaaatcttcactatctaaaattatactcccatatccataacttcttttattgctctagatatccttacagcatttttcattaccatttagtagcttatttgtctttccttactaaaatgtaaactaaatacagacagaaatttttgtaattaaaaaacacataacaaaaaatctaccatcttaacaaaattttaagtttgcagaccattttgttaatgatatacacattgttgtacagcagaaatctagaatgtttttatctcgcttgactgaaactccgcacctggtgaacagcaactccagatttcctgtttcctccagaccctgacaactaccattttatcttctgtttccatgtgtttggctactttcaatacctcatataaatggaatcacgatatatttgtctttgtgtctggcttatttcacttagcacaatatccttaagattgatacattttgaaatatgacagaatttcccttttcaaggctgaataatattccactgtgtgtgtgtatatatatatacacatatatatatcatatatataaccatacatatatatatacaatactatatatataccatacatatatataccatacatatataaatatatatatatatatattctcaccatattttcttcatctgttcatttgatgatggacttttagtttgtttctactttttggctattgtgaataattctgtaatgaatatgggaatgcaaatatcacttcaagatcttgttttcaattattttggaattattcaattattttggaaaaatgcccacaagtgggattgctgcatcatatggtaggtctattttttaatgttttgaggaccctccatactgttttccatagtggctctaccattttacattcctactgacagtacatagggttctaattcaatttctccacatcttcatcaacacttgctattttctttttttaaaaaatggtcatacagttatgaggtgataaatcctcttgtgattttaattagcattttcctgatgattaatgatgttgagtatatttttatatccctgttggtcatttgcatgtcttcctgaaaaatatctatttaagaatttagccatttttaaattgggttatgtgtttatttgcttttgagttatagttgtttcttatatattttggatattaagcccttagcacatatacagttttcaaatattttctccaattctgtaggctgcctgttcactctgtggtttctttttttgcacagaagcattttatcttgatgtaatcaccctaacctatttttgctttggttgcctgtgcttttggtgtcaaatccaaggaactattgccacgaccaatgtgataaagcctttctttatgctttcttgtaggagttttacagctttagttcttacatttaagtcttcaatccgtttggagttaacatttgtgaacagtgtaagataagggttcactttcattcttttgcatatggatatccagttttcccaaaaatatttgttgaagaaattatcctttctccattgtatagttttgtcaccctcgtcaaagatcatttgactatatgcatgtgggtttatttctgggttttctttctttctttcttttttgagatggagtcttgctctgtaacccaggtgggagtgcagtggtgtgatcttggctcactgcaacctcttcctcctgggttcaagcgattctcctacctcagcctcccgagtagctggaattacaggtgcccataaccatgcccagctaatttttgtatttttccatagagacggggtttcaccatgttagccaggctggtcttgaactcccgaccttagatgatccgcccgccttggcctcccaatgggctttctattctgttccactaatccattctcttccattcatctatatgattagttttacattaatatcacactattgggattgctgtagctttgtagtacatttcaaagtcagaaaatgtgaggcctctaattttgtttttctttcttaggattgttttggatattcagggtctgttgtgtttccatatggattttagaattgtcctttctatttctctaaaattagcattggaattgctttggctagtattagaatttataaatattctttcaattcatgaaaatgagatggctttccatttacttgtgtcttccttaatttctttcagcaatattttgcagtattcagtgtacaagtctttcccccaccggctaagtttattcctaagtattttattcattttgatgccattgcaaatggattgttttctaaatttccttttcagaatgtttgctgtttgtgtttttttgaatctttactttgaattctgcaactttgttgaattcattttattatttctaagagctttttgttgaatctttagggttttttatatatataagatgatgttttctgtgaatagaaaaaattttacttctttccaatttggatgccttttatatctttttcttgcttaattattttagctaggactttatgtacttcataaaggtgtccttgccttgttcctgatcctgatcttagaagaagagatttcagtttttcttcattaatatgatgtgagctgtgggtttttacaaacggcctttattctgttggaataatttccttcttttcctattttttcaagtgtttttctaacgagagaatgttgaattttgtcaaatgctctttctccatctacagagatgaacatgttattttgattgttttgttaatgcggcatattatattgatttgcacatgttgaacccttcttgcattccaggaacaaatccatcataattatggtggatgatactttatagtgctgttgaattcaatttgctggtatttcttgaggattttgcatctacattcattaggaatatttaattttttttcttgtagcgctattgtctggctttgatattagggttatgctagcttcacaacaagagtttagaattgttctttcttctttaatttttttaggaatgtttgagaaatattggcattaattcttccttaaatgttggcagaattctctagtaaagtcacctgcacctgagattttctttgctggaagatttttgattactaatttaagcaccttactagctacagatttgctcatatttttatttcttcttgattcagtgtcgtgggttgtatatttccagtaatttgatttttttctaggttatccagttactaccataatcattcacagcagtctcttataatcttttcttatttctgtggcatcaattgcaatgtctactttttcatttttaattttatttggttgagtcttttctctttttaattgccatattccattgtatagtaataccacagtttttttaaatctattcacttgcattggttctactttctggttataatgaaaatatgtgtgtgaaaatatcctttatttgcattaatctttattatttccttccttttgctgggtttgggcttagttcttcttttttagttccttgagttgtaaaattaggttgtttatttgagatctttcttcttttttaaggtaggcatttattgctataaatttccctctttagtcctgcctttgctgcatttctaagttttgctatgttgtgttttttatattttgtcagcttgttttctaatattctttttgatttcttctttgactcattggttgttcaattgtatgttgtttaatttccatatatttgtaaatgtttcagttttccttctactattgaatttttgcttcattgtacttttggtcaaaacaggttcttgatttcctttgtcttaaatttgttaagacttgttttgtgacctaacatgtgatctatcatggagaatatgtcaggatatgtcactttgccagataatttatatacctccatttttgaagggttgatatttgaaacttattttggtccttttattgggccatgtttccctgtttccttgtgtgccttttaattttgtgctgcgattctaggatttgaaaaaaataaccacttctccctgtctttacagactggttttgcactgggaaatcctttcaccagtcagcccagttagagattctgaaatgtgtcaaatctttccgtgaatgtattgtctctggaattgtgtgtaaattcttagaaaaatttgcaggtctttcttcgggagtgtgtaatctcttgctctctttgttatctatctatagtactgtaggttatctggagttgctataaccccctagctctcttttgttctcagcagtcctcagacatcaagagtatccggtcagacagaaaacagtccatcaagctgactgggaaaagttggaattctggatgcacactccagctttttccttctccaaggggaagccaggagttgagggttttctcccactcattgcatattgatccagggaaggatagtatgataagtgaatgtatgctaacccaaactgcctcaactcatttgttcttaatatccccaacctggaaagctttcctgttagcacttaaattcaggcaagacagaaaacaatcacttgacaactcccctgaagtctgaacactgaatgtgtgtctcagtattctctttcatttctgtgggggaatcaggaactgtagagtattctcccaatcttgttatactgagtcacaggaggaatgatggtgattgaatgacagtccaaactgtgactttatcagcaggcatgcaatctggcatcctttcctgttagcacttagattcagggtagataggttctagtgccctcccaaaaagtcaaaatgttggacatatggtctagacttttatttctctccctagagatgagctgggagtttggagctttctctccattgcgttgtactcctgagggaggatgagtgagtgcaacaaatttacctgctggtttagatgtgcctggcttgaagcctaccagggaatccagagtctttaaattctcctctgtacttttcacaaaggggatttatctgtgtattattatcaagctggtgtctccttggagaggagggtggaggggctttgaggctttctatttcatcatcttgctggtgtcctgacaggaattttaaactgggctcctttccccgcagtgtgggagaatggatcctggctgattataagtactcatgaaatactggataaattattatttatcatttacttataaatatttaaaatttttattatgggaaataagtttttaatcattaccaaagtttgttgaagcactaatttattattgtgaaaagtggggaggggaataaaaatcaagcttttgtctactcatcttgcttttcctgtccaaactgtgttttggtgtaatcaatacacatttgggaggaaatgttcttttagaaattattccagctaataaatgaagaaaaaaaatgaaagaatgtagtaccctgttataacacctagtaaaataatggttaaagcaagttttctaatgaatgctaaaactattaggtgaaaagttgatgcaaacctttactgtggaggaatgtggctgacattaatttcttatctgaattacatttttgaaactttatgactctttgaatttaaaagggattttggtgtcattattttttcttttacactctctttttcacataaaaatcaactattaactgattggttttatggtcttttggaaagagactatataaattctgctttttgtatgaagatctcttttacgctgtcagaggaaattttacctctggtaagctctgatttcatctttcaattttatttttaatttctttctttgtcttttgttttatcagcaccttgtttaatttaaaatagattcaatgtcaaccatcaaggagttaactcaggaaactaatttatccagaaatacaaatatttttacatatattttatcctttgttttagatctttaatatgtaatttctaaaaatgaaatatggacagtttgcttgatttctgagcatagtcaatgaataattttaccaaaatacgcaaacatttttcgagcttttcttttcccttgagactgaatcttgctctatcacccaggctggagtggggtggtgtgatcttggcacactgcaacctctgccttccaagttcaagcaattctcctgtctcagcctcctgattagctgagattacagttgctcaccaccacacccagctaattttttgttttattttattagagatggggtttcaccatgttggccaggctggtctccaactcctgacctcaagggatctgcccacctcgaactcccaaagtgctgggattacaggtgtaagccaccacgcccagcctggagcattttgatataatgaattactggggaaaccttttaatataatgttagacagcccatttaaaaagaatccagtataattattatattctttatatgactacttttcacagtgaagtaacttagcactctgtatttataatgctttgaaaatacatattagttgctgattttatattccaaacagaaattataggacaccatattatataaacacaagatttcaatattaattttcacactttaaaacaataatcttggccctgtgcggtggcttgtgcctgtattcccagcactttgggaggtcgaggcaggcggatcacgaggtcagaagattgagaccatcctggctaacacggtgaaaccccgtctctaataaaaatacaaaaaaaaaaccaaaattagccgggcgtggtggcgggcgcctatagtcccgctactccagaggctgaggcaggagaatggcatgaacccgggaggttgagctcgccgtgagccgagatggcgccactgcactccagcctggatgacacagcgggactccatctcaaaaaaaaaaaaaaaaacttttcaatttttaaaatttttctcaaactacccatcagagaagtttaacatctccatttacatttctatgatgttatacagaaatattttatttctttccccagaataatataggcaaaatctctccctctgactatacacacctggtattgttattttaattgtttaggggtttctatctcttcctattctgaatgattattctctttttgagctttcttgctgtaaccgttttagtctgtagacaactttctagattccaggatccacactaatcttcctgccgttgcagtttctgtcttctgcaagagtctagcttttatgagaacaaaatagtcatatcttctttaaagaagagtttccagtgtaaagactaaaagtttaagttaattgtaaatgaaagactccagttagaggagaaaatatttcattttaagatgactgtttcagaacacaattacgatattgaagatgaatctcactatagccacattaactacgtctatttcaatttaaggggacacagtaacaaatcttacctctctgaaaagaaatcaaatctgaaacatggtggagaagtatgagccctgaccaagagattttcttggaagacatagattgacttatagcaaatgttatctgaagtggtaaaatcttacactttatttttatagaaaacagacaataaaaatctttctaaattaatgtataggtacttttgtaaaaataacataaaaatatctgattaacttagatacataagttctttaagttccaaaataaagaatgagagaagtttatagtttgtctgacttttattcttttcaatccataattaattccatagatagaataatttgtaatgtaactttaatcattacatcctttgatcaaaaatatacagatattcttaatttttcttctcatatttacttaaattatttttcatcgctttaatatttctttattcactggtcccataatagttcactaagtttggtatttcttggttttgtaaaaaatttcccaattcagctcctgagcacagtgagtactcttctctcctcttccttcgtattctttttaggtccaaccccatggctttccttttgtactctctaggccaagaatgttctttcttattcctaccatttaaccatcattcatttttcatggctgtattagtccattttcacactgtcataaaagactttcctgagactgggtaatttgtaaaggaaaaacggtttaatttactcacagttctgcatgctggagaggcctcaggaaacttaccatgatggtgggaggagaagcagacatgtcttctatggtggcaggcaagggagaaagtaagcatgtgaaggaggaactgtcaaacacttataaacccatcagatctcttgaggacttaactcattatcatgagaagagcatgggagaagctgctcccatgatccaatcacctcccaccaggttccttcctttacatgtggggattacaattcgagatgagatttgggtggggacacagagccaaaccatatcaatggccaatatatatttttcttttctcatctattcctgactatgtcctttctgaatttcttccatactttcaacctgccccacaaaaggcagagcttactcatatttcttatcctgttatctaaaaattaattttgcttgagtttgagaataatagtcaataggcaggggatgagcaggccatcaacagcatcctttattttggcagaaattattctgaatcaaacttaccatgtatagttacatgatctcaaaaagaattaaaaatctctatcacttgaaccacagtttcccttagcatatttaatatacttcatttttgtcagctaacaaatgttagctaatatttttaccatcaagaagaatatcctttggcaaaagaatatctgtttcattagtacatattgagagagttggaccctatggcttcccaacttgctcaggaatggggaagctagggtacccagataggtaatcttctgttttgatacttatagcctgactgtatacagtgtcaaatctgggtcttgacctagcaggcacacattaacacaacatgaaggaaggaaaaagtcatttatgaaactacaatggctgcagtagttatttggtagtcctctttttaaaaatttccttttaattgaaatgaaagtttataagtgatcatactgtaaatgatataacattttataatgttttattacaaaaacgcaaacactccaggagtgaattaaatgtaaattgaaatctccctctctctacaatcccacatgcctcatcatttcctctattccttagaaatccaccgacaataatttaattagaactgaaatactctcactcataaaacgcatatgtgtacttcttaaaaaatgggattatgctaattatgatttgtagtgacctcatatttcatttgaaaatacattggatatcttgtcatcatttaaaatgactgtaaaatgttaatttttaccagtattttcataaaacatatctattgaaaatttaagtcattaccatctttgcattttttataaacttatataatgaacagctttgcaaatattagttagcacacttgttcaattatttaatagagatctaatctgaggagttgagaattttcaactctttctcaggaccattcctttggagtgattttggaaatggaggttatttttggttgtatcaatgatggagacatgacaagcacttacaagtaaagggtagagatcacatgcaacatgcattgggccaaacagtgcattgagacaaacagtcctgtataaggaagaattgctttgtataaaggcccaatagtacctcttggagaaacatggcaacatgaggtatttcactgtctactttaagaaatgttgcactatttgtgcattttacaataaatatctattgatcttataatctgtaaaacaatatactattgtttaaagtttgttttgttttgttttgtttttgtttgtttgtttgtttgtttgagacagagtcttgctctgtcacccaggctggagtgcagtggcacaatcttggctcaatacaacctccatctcccgggtttgagtgatttcttgtgcctcagtttcacaagtagctgagactacaggcatgtgccaccatgcccagctaatttttgtatttttgtgtttttagtagagaaggggtttcaccatatcggccaggctggccttgaacccctgtcctcaagtgatccacccaccttggcctcccaaagtgctgggattacaggtgtgagccaccatgcctggcctattatttgaaggatttaatcttctcccatcccaacaagaatggaatttttcaataaatccaaaaaattgtttctttgaaaagacaaataaattagatgacaaaaaagagaaagcctattaaaatataacaagaaaaatggaaaactggataactgaaaatttcaaaagaatgtaatatgtaccttttggtcattatatttgaaaatatatatgaagaggttaactttttagggaaaatttaactataaaaataaatctagagaaatgagaacatttgaagatacaaacaatagaaaaaaatgaaactggtataaagttatagcacctttaaaagcacaaggcccagctgtgtctcaagtaggtcctcttaaacttaatggaaaagttaattcctgtgttgttcaaactattcttttggttaatgggagcaaaggaagcatatctctccctccatttatttcttaaaacaactgaaaaccaaaagaaaaatcaacgtacaaagaaaaaaactcctccaattttgttaaaaataaacaccattaaaaattataaaccaaactatgaagactagttgttagtgccataacaatttaacctttcttcaaaaaatggtgagagtagatgcagacacctgagcaaatatggcatgttaaacacatagagagacttattttcccacctgaaactataacatgatggcaaatggcttattcaagtgatataaaaagaaaacagcaacagttttgaaaataggaagtccataaatggctggtaactcacttagcttaccaaaaagtgcaaaattgtaagtagcggggaaatctgattctacaaaatgttcgtaaattggttgcacaggatacctctgaaagtagaagtaaaggtagggctaaaacccaggaacactggttgaaagactgtttccaatgcccactccatcaagcctcgtgaatgcctctaggttctgctggtggaaaagtagacatttgctgtctagagaggtagcagggaatctcagtactggcaatatcatcttcattggtcatacataaattaggggggcaaaatgaacagtaactactgaaagctagatctccccaattttcacctctatctagattcaaaacataacagtctattagtcttataccctcagagaagactggaagactctagttggaagatcatgatcagcccaaaggaatagaccagtggatatgtcatgaggggcttttctgggaaaagttctcaacctgattgccctgtctggaagccacagttgacaattattacttaagaacctgaagcttactgtaaatgtttattgtactgcttttcaacacaaacagataaccaacaatcacgagattctaggtacagccaataacaaacacagaaacaaaaaaaaaacaaaacacctgaaagtaaacagagtgtataccgtgtgggaaaaaagtaattattaattttctcagagagggaagataatacaacaagaacaaggtgtgttataaaatggatattcaaaaaaatagaattcttaaaaattaagaaatttattgcagaaatacataacttaatgggagatttggaaggtaaagctgactgcatctccagaaaagttagtgtaaacagagttgggaatgagaaagggaaagtttaatgaattaaataattggtcctatagggccagcaacaaaatacaggcatttgggaaaagaaaaaaatacaatgaagtatgatatatataaataattttatgaaatgggtaagagttaaagtgtatgaatttcagattgaatgtgtccaccagaattcaagccagtggtgaaaatagacctagaccaacacacacacacagacacacacacacacacacacacacacacacaaatcagcacactccagaagaaaaaaaaagaagacacttcaaatttccagagaagagaaataaaagtggtcactagaagagaagcaaagccttataaattgcaaaataaattatttctaatgcagaatagtatctccaaccaaactgtaaatcagataggaggaaccaataataagcatttacagcatggcaagattctaaaactctacatccaatacatcctatctcaggaatttactggagaagagtttcactaaaatgaggaagtaaatgaagaaagggtagggtataaagtacagggaatctcctggtttttagatgtacagtatgtgtacacagcaacctgtgtaaattagagttatctagaaaaaaaattttcaaaaagataaatctgataaaatgtctaaggcttctgaatgcattatgagactcattagaaaactgggttagagtttggagttggtactttgatacatacatagaaaaatgaacaaaacaaaaatttttaaaaattgtcagtttaagggaaagaatgttgtgtagaaatgaaattcaatcatttatgctccatgtttcacgtgtgagtaacatttacctaattataacagtactagtgttactggaaaatggggtcctgatccacacttcaagagagggttcttgggtctcacacaggaaagaattcaaggtgagtcacagagtacaatgagaagaagacatagtttattgaaagctactgtcttttagagtagggcatcctcagaaagcaagtgaaggaatgcaccctctttgttttcagtttttctgttataggagttttgtctgtgtaaagactaaattggaaacaaaataacaagaagaaggaatttatgcataatcttcaaatcatgaggagtaaaatttatacaggacctatcgcttaaagagtttcatagtggttaccagtgggcatttggtgatgtttatcaatgtgattcttgaatgtaaaaaggactacttataagatttcatattctgaactaatgtgcagcatattatgttaaattgttaaccaatttaaaaaatttttgagtttaaattagaaatcttattgttctatttataaatctagtacattaaaaattatttttaagggggactttgattaatgtttggtccatttacaacatagttaattaaactcccttaaagattttaaactacatttataaatttaatatgttcaattatctttgtgaacattttaattatcaaactaacaaataaagctttcagagtacttaaacaacccttatagagctaataaattaaactcacaaaatcacgaatcttaaattatcttcaatgttaaaccactactagcaactcggtaaagctgcttataatttcaactaaaaacaaacccaatatctaaaatactctgttacacatttaaaattggaatgtaaaatgctaatctatatttaaatactaatacaattataaataaatatcacatctctaaagtataaatattatagttttcatatacttcatcatctctaaactttttttcaatgttttcctgggataaaaaaatcataaaacaattagattatcttaagcaaatggggttatcacctcagtgagttgtggctactttttcaggttgtttacctctcagagattttgactggaaaatgagatctggagcttcagatactcagggtaattgtttgtttttccctcattaatatgggaacaaattctaacgttgtaaaaattatgttaatagagattccaagcccatgaactctaagtgaaatggccatgcaatccatgttttctagatccatgttgcctatatctttagcctgattttaatatctaacctccctactctgattgtttaagtactagattaaattcaaaaatctatttactgtatgatttttgacagagttctttttatattcttcatacctggtgaagtcataacttttctagatatttaaatgacatacacatgtattatttaatctcatgtgtatatctgattctgtggtcacattttccaaggccagataaatgactgtagccagacagatgtagggctaggtgtaaaaagagatattcccacagattatatagttgctgtgtagagaaaactctctaggcttttcctctagtctcacatcacaaagatcaatcagcaacacagaagacttctgtgaccaaatgtgtgggttttttcctccatacatacaccaaggagcagacaccagctgagtgtcctctaattcagttctggcactacactgtctacctggagatagtgtcaggtctcacaggtcagtccccaagactgcccaccctcaacctaccagccacaagtccagacctctgaacttctgacctactgggttcaagttgggttctcatgaccccctctttgggtttgattcatttgttggcgtggctcacagaactcaaggaaacacttacatttcctggtgtattataaaggatattgcaaaggatatagatgaagagacacttagagcaatgcatgggggaagggagcagagcttccatgtcatccctgggtgggccaccctccaggaacatacatgtgttcaactgcccagaagctcactgaaccctgtcctcctggattttcatggaagtttcatgatatcagcattcctccctccagggtatagggtgggactctctcctgaggtggtcttaagacccataaccagtaaggcaggaacataaaaatgaaaaaaggccatgagaaggtgagaggcctgctcctgaggcctaacacacccaatattataacaaaagacaagtgctaggggagttataagccaggaactgtggatgaaaaccaatatacatcataacaccacaggtgctgagaaaatattcatggaaaatagacctaaattgatactgcctattgacataatttactttactgatcttttccttcaccattttaataaatagctcagacaataatgagtcccactcaaagataataatagaaaagataccagcactgtgcctgtgtaacatatatttcatgttagagaaaagcaacaaagacaatataatattaatagacagaaaaaaattacatgccacattgactatcattgaatcacaaagtgaatacaaatttttaatgcattgtttcattaaatcaaattccccttcccgcaccaatacaactcctctgatgtaagtgacctaaaaaaacataaataggttttaaagcagatataagataaatgcaatatatgtagtgtgagtttagggaaagataaaagggaaaataccttttatctgagaaatatataccacactagaaacagcaaaaatgaagaacagatattttcaaaatttactcaaataaatgggtataagaaaaaaatcgagcaaaacaaaatggaaaagaataaataagtaacaagggtagaacaatatttatagttgtttgaagacagacaaagttgacctaacatgttaccatgtatattttatccagttttccaattttatttttattgctggaaggttaatttggtcagagttatttcaccataacagcaagtataattttccaaactcacacctcttacattttgtatcttattttttatcttattgttacatattttataatgttatatattctatactgaattatacactaaataaaaaataaaatatgaacacaacaatttcatagaaatggtgaggtttttttttttaattgaggcagaagttcatgacttgaaaatagaaagatgcagtaaagaaataaactcaagaactcattttatggaaaaagtgaaaacaatttgcaacattaaaataattaatcagaacctcaatacagattaagaaggaatagagaacaaatattaaaattggaaggcaatgaaaatataatcacagatattgatcaagtaattagataagatcattttcttaattatacacaaatatattggaaaccctggattatatgattttttccatatgaaaatataagtgaccaaaatgacaagagttataaaatctcagtatcttattaatgcagaaaaagatgttgaagatataaaattctgaacattctcctctcaacaaacagacaccaactcgtcatctagcattaggtatatctcccaatgctatccttcccccctccccccaccccacaacagaaagcacaccagcatggcacatgtatacatatgtaactaacctgcacattgtgcacatgtaccctaaaacttaaagtataataataataaataaataaataaataaaaacttttaaagaaaaaaaaatggggaccttttgcttatgtggttactaaggcaaaatgtaagtcatgatttttctggaccagctctgaaaaaatgttctggttaagactgggtaaaatggatgatttatttattcaataaagttattgaatgctcaccatgtgcaagatacagtgttgaatgtggtgcaaaatataaagatgtggaagaaaaagccacggaaaataatatgaggaaataaaaaaactagagtaaattatcagtggaataatttctattatacaagacactacacccatatattctcctaatgctcatgtaagaatttatccaaaaataccttccagcactacaaactagaagaaaaaagagacatggataccaaattaagttcttaatagtgaagaataaaagagactaccttgcctgctccagtggatccagcaaccgccaacaactgtcctctttctatcttgaaattaatatctttcaggacaggagtaccaagaagtgagaaattactgaagaagaggctgtcatcaccattagaagtttttctattgttattgtttggttttgctttctcaaataattccccaaatccctgttaaaaaaaaacacacacacacacatcaaaaataaaacatgagtttgtcagaaaaaaaaaaacaaacaaacaaacagacaaatcagcaggcatgaacattttcaagaagaaatgtatcaagacatgaaagtactgataactcaatgctatttaaagttttcctcttctaattctagctatgacaagttaatttgtatcaggccatcccacctggcaagaacaattatgaaagctggataaaattgattaaaaataagtagctatttaagggcttctgatagcaatcaaagcatccagaacttgagtgtgtaagctctcagaaagaagagaaacacactgaattgatttcaacattctccacaacctttcatttggatacatttgctgagcagatagctaagaagaaaatggtagctcagagatgttagaaatctgataggcctgcatagacaagaattggaattcatgactatcatggtggccagggcttgataaagggccagcagaaacaaaacaatttcgttttgtttttccttcacaacattttctgattctttagttgcagaaggtgagcaactaagaagcttagcataaaatggagctacccgactaaaaggaagttaagcagaccgctcagcaaaaggatagacaaaatcggagttcaacaagaacagaggacctagaaatctccctaggcattgagatccctaaaaagctaatccctagctgaaaaggcaaactagaaatgcaccagctgacacaaagactgaaatctagcctcaaggcatttcagtctgattggaccaagaggatctacctctaagccagaagaaaactacaatttctttggagggagatcccatctaaagactttttctcttaggtcaatgtctggcttttgatcataaataaccaggtgtatcagtcagcagggctaaatgatgcatgcacacacgtgtgtgcacacacaaacagagcgagagtgacagtgagagggaaaggagaaatccatagctttaaatgtttccatgtaaagaaaataaaaatacttccaaatatatttatgaataaatattgtatttattctaaacttgaccacagctgaacacatgtgttctcttcccatccctttcccttcgtctctctcatatacactacacacaataaaatacaggcctattccctaataaatattactgcaaatattctaaagctgtactttacaattaaaagttgcaatcccattaaaatcatacttcataatcaagtagtgttcatgttagtaagcaagaatggatgactattaggaaatagtttactataatttatcatgttaatagaaaaacaataatctccagaaacttcaacatatattaccaattaaataatattaatagaatagtattataatgagatagatgtaatttaatccaaaattcagaatttatgtgatggtgttttggtacagggcctttgggaagtaacaaggtttagatgatgtcatgaggtcagggttctcatgatggaattagttcccttataacatagacaccagagagcttgatctctttccctgcaatgtgaggacagagtgagagaacttgactgtctgcaagagaacgctcaccagatagcaaacattcacagatcctgatcttgtactttccagcctccagatgtgtgagaaaatacatttctgtttaaaccactcagtctgtggtattttgtgatggcagttcgagcagactaagacaaataatgacaccattcatgattgttcccgtctaccagtcaccaaaacaagttctaacaagattaaagaataaattcccccaaaaggtaaacttaaagcctaaaaattagaataaattgtaaataaagataaaaaatataactggaggcaatcaaaaatatatatatcctaaggagattgttaaagctatatgaaaaatgtatgctaaaaatctcattggagcactattcataaatctaaataattataaataataactatggttatgttgattatggtaaatccatatatgttaacataatgtggtaatttgtaaatgtttataaagcattcttgtatattagcaaaacaatttgaagtgtcaaattaaaaatcctgaatacaaaattacatgtaagttataattccaagtgtgtttgaaaaattacatataaaaataatggaagtaaatgcaacaaactattcatagtagaattttattttacagcaactcaaaataatgaaacaaatcctctggcttacaactttcaactaggtattgtgattttcttactattccattcagtaggatataggtggcatggttgtattttcagtttgtcagtgttctcctggcatcattattaatagtgtccctgtcactttcacaagtttcctggtttgcagaataaattatatggttatctgacatatgggaaacctaattttcttccttcttccccagtaataatctatacaattctggacaactcacctatccataaaacaatttgatctctaccttaaaatagatatatctctgccagttaacttcatagaaatattgtaaggattaatgaggagatgtttggaaaatactttgagctcatcagagaaaagtgctatgatattgccactaataaatttatttactagcttgctgagtagaaagtcaagggaaatcaagattttgtgggtatcagtgacaaaaccaaatcaatcatgcatgttctggcagcccattttatataagttccccagagtagagtagctagtgaacatagaatttctccaaaatatatatatatatatatatatatatatatatatatatatatgaacataaaacttctccatatatatatatataattaattagaaaaattagagacacataggctaaattttgactctatataggctattcagttagcagttatgagtaaatgtattgaacttctctttcttggtgaaaatattgtgttccatcaagcactaaccatatggaacgtttggaagttgaacaaggactgttcattaagcttgaaagggacagatctgagccagctagcactttgtaacctggcagtcaggcctcaaaatcaaggctattattttagtagaccaattaagttttttagaaactcagtggaaaggtggcatcttcacacattttcagcaccttataaattaggtacttttgcctggcactaaaatatccttcttgaacttaaaaatcaaaatcaataaatcagtctacttctcaggcaacaaagaagcagaggaaaggcaacaacggggcagattaaacttctagcaatgaatcccaaatatacaggagccttagtttgattaagatgacaaaaaaacacctggaggaagggcactcaagtctggctcatggtctctttgttcttcctaaaatctacatcccttgcatcaactacagtactatagccgatgttttgaagttgaagcataatatcttattttttctgacattgcaagtatataacatcacaaagattttttttctttttctttttctttttttttttttttgagacggagtctcgctctgtcacccaggctggagtgcagtggcacgatcgtcactgcaagctctccctcccggcttcacgccatcctcctgtctcagcctcctgagtagctgggactacaggcgcccgccaccacgcccagctaattttttctatttttcagtagagacggggtttcaccgtgttagccaggatggtcgcgatctcctgacctcgatcacaaagttgattatcttttcacttttcaagttcttagaccgtctatctaaaattcgtatcttgacctttcatgtctgtcttcaagaacaaatcatctctcttcccactctctgtcaatttgatctctttctctttgctttgttctggaggagagaaaggtgtatctgtattattttcttctttgtccgaattaaacagctgttcttggagagtggtgagcagttctttatgcaaaggaaaactggttacttagttttgtaccatttacaaaaaaagtaagaaaatgctgaaaaccattatcttaaaatattcattttattcagttttattttaattggggcacagatataagggaatatttttagttgaataaggaataaaaatattttgttataaatcctcaagaatatttataccttaaaattgtttttgtatttctgtttctatgacattcaaatgggcaaaattttttctagaatttagacagatttacaaataagtgcgtaaatatgtctggaaattgaacaattaaaagaaaaatacaacaatgagaaagtgaattgaacttgaaaaataccctaattgtgaaaatgaaactttcatagtattattttaatgttttctgatttgcattttgggaaatcttgccttcactgtgtttttttccttagattttctccacatactgttcacaaaattcagttaaaaactattttagagattgtccagggaaagggctgcatgctcagtcattgactgttacttactttggtacaattaggggtattaaatttgagttcattggatttgtgcttctccccacacaggctgactattcgtagctgttgctgcttggaatacatattggcttaattaatcagtactatttggaattctgtgaaaatgcaaactaattatgaactttctccaataagagacaattttggctcctgattatttgcttttccctacatttatataacagcaatctcatgaaatcgagcattagaccagcatgttattgatttgcacattaggcaatttgcacctctgaattgctttcctttctgatatcctcagatgcaaaatcttgaaaaagagcatgcagtcagacctttattggattgtttgataattgttttttctctctgtttccattagcattatttgtggaagaccatagcagtgggagttcttgtcacagaaatcttgtgacctctgtgtttggtagctatagactgcaatgagtttatctcttcataggggaaattgagaagagattacttctacccactacccaagctctggttttctttacaaagcttctgcataaatcacaactacatagcttcaatgacggacctaactcttgcttggaagtgtggcagcagagttgatggtcatggatttaagctacagtctcatcactagtttatttatagtaaacactctgggggagacttttagtgctagattctgtgctagactctggtgttgaaatatgtgtcagctatggcctcagctctcaaggcattagttgtgtttgtgtgtattgtgtgttttgagggaggtgttaggtgttggttgaaagaatgaggaaggggagcaagatttgaggagaaaacaaacatacacacatacatggtttcattgaataatctgcacttctgaattgtcaatacatccatctgattcagtcataattgaattagaattatcctgagcggcggtggaaaacattgaatattttttttcacactgaagccagaagtcttgggtaccataacccagcaatattgtttgctggctgtcacttaaactcacaaaacacctctgttttatcatctataataaatacagatacaatattctgttttatatatatgtatatatcttgcaaaattattgtgatgatgaaaaacgaaatgtaatacacactgaataatgcgtagtagatgggaagcactaaataaatggctatgtaagcagtgattcctctctttgttatcttcattattacaatttctacataggttttatttcagtgatttttatagtaatgactttgctaattttataaaaatacttcatgccaaagagtacaaagaaaacaaaataaatcacctcaaattttcagaaataaccaatgttaacagttggtggaattcatttgggtgattttttttttgtttcttctttgcactttttggtgtttttcaagtttaaaaggaataagcacatacaattattataatagctgtaaaattgttatatgtgtttcaaatttcatattccaaaaagtttggatatagatggaagatacataactatatgtatagtgagagagagctagcagaatagataaaaaataattttataatgaaagaatactatatctgctttttaaattggaagtattaaatttatctatgtgactgcattatttcctaaaaggtcacatttttaaaaaaaattaaaaaacattagaagattgcatcattataatttatttcttaaattttaattatatgtatatctatgaataatttatgcataaacatatataggtaatgtcaaatcctaagaaaatgtatacaccttaaggaattatcacaaaacaaacacctccacaactaccactcagaataacattttttttgcaaaatagattactactccttcatttgtcttcaaagatacccattatttggagtttacttttcttaatgttttgatatttatatacccactctgtggtaggccaataatgcctctgaaaggcatgtccatgtcttaatccatggagcctgactttatttgaagtagggcatttgcagatgtatttaagatatttgaggccgggcacagtggctcatgtctgtaatcccagcactttgaaaggctgaggcaggtggattcacctgaggtcaggagttcgagaccagcctggccaacatggtgaaaagcccgtatctaccaaaaatacaaaagttagctgggtgtggtagtggcagcgcctgtaatcccagctactcgagagcctgaggcagggagaataacttgaacacaggaggcggaggttgcagtaagccaagatcgcaccattgcactccagcctgggtggcagagcaagactctgtctcaaaaaaaaaaaaaaaaatagaagaaagaaaaaagaaatttgagaggagatcatcctgggttatctgagtgagccctaaatgccatcagaagtgtccttggaaaaaggagacagagggagcagaaggcaatgggacaatagaaacagagaagtttgaagatgctgtgatgctggatttgaaaatagaggaaggcccacaggatggaagaggccatgaatggattatcttttggagtctccgttgagaatatagcccttctgccatcttgactttaggtcagtgaaacaaatattgttctggtctctctaactgagagagaataaatttatcttgtttaaaatcactaagtttgtgataagttgttacaacagccccaggaaacaaatacacactcatttattttattttactgcttaacattatgcattgtgagtttgacctatgttgttacatgtagttctaatttgttcattttcattgctgaataatattcaatatgcaattttaaaaattcatctttttttaaacaaataatgctgctatgtacatccttgcttgtatcttgtggtataaatatgtaagtgggtagctgcatccatttactttttctccaacagtctatgagaatttcccttgttctgtatcttcatttatattcgttattgttagtcttttaatgttagacaaactagtatgtgtagaatggtatgtcattacagttttaatttaaatttctctaacaaataatgagccattttcatcaggactgagccttgggtcaaacaagagaggcatctagggcacacaatttaaggatgtgtttattccctttcctttctgtccttgtttgtgatgaattatttctactttatcaaacaaaaagtgtaataggtatacaattgatttttgctttttgtgcatttgttataaatccagtcaccttaccaaactggcttttatttctaattgtttgtagataatttttgacatttgtacatagccatgccatctccaaattagcatttacctttccttttcaatatttacaaatttaacttcttttagttgccttatcccactagctggggccactataaatcttttatacttgttttgatgtctatagatactgtagtgatgtcctctcctttattaatttctcacactggtaatttctggtctctctttctttctgactgtttatctttctgtcactctcttcccctctttctccgtgtgtatgtatgtgtgtgtgtgtgtgtctgtataaaagaatttaaatatacggatagtccttgacttaatgatggtttgacttacaatttttcaactttacaatactgcaaaacaatcacaatttcaacataacgtaccatattcaatacattacatgagagattcaacacttgctgatcaagtaggctttctgttagataattttgcccaactgtaggctaatgttagtgcactgagcatgttttaggtaggttaggctaagcgatgatgtttggcaggttgggtatattaaatgcattttctacttatgatattttcaattatattgggcttatcaggatgtaaccctatcataagttgaggaacacctgtactataattatgcaattataaagagattcattatttttttccaggcaaaacttttttcgttgatttttctcttatatgtctgttgtatcagtcagttttcaaattactataaagatactacctgagactgggtaatttataaataaaaatgatttacttgattcacagttctgcatggctggggaggcctcaggaaacatacaatcatgacaaaaggtaaaggagaagcaatgcacatcttacatggcagcaggagagagagcaggaaaaactgccactttttttgttttttaagacagagtcttgctgtgtagcccagactggagtgcagtggtgtgatcttggctcactgcaacctccacctcccaggttcaagtgattcccctgtctcagtctcctgagtagctgagattacaggcgtgtgccactataccaagctaatttttttgtatttttagtagagatggggttttgccatgttggccagctggttttgaactgatctgaagtgatccacccacctcagcctccctaagtgccgggattacaggtgtgatccattgcactgacaaaactgccacttttgaaaccatcagatctcatgacaactccctcactatcacgggatagcatggaggaaaccacctccatgatccaattacctcccaccaagtccctccttcaacacttggagattacaattaaagatgatatttgggccacacagtgccaaaccacatcatcctcatttttttcaataatttcttcatcatatctcatcatgtatttatttacatgtattttgaaattgagtactaggcattatacatgaaaaactgagagtaatctgaagccctggaaatgttaacattctctagagaagaattacatttgctctttgcagtaagctaaggacactagcaggttactttaatgcatccataagtgtacagataatcagacactaggtttatgtccatgagtgggctggtctttatcgagtgtagtccttgcccccaactcaaagcctggagggtactgtgctccaattctccccaccacattcccttgcacactcacagttacatgcatttcactgccaaaagtattccttagttttgcgatctgttttttaacttcctagaatcagtaaaaatcttgagctaaaaagtgatgctcaatgtcaagctcatctcttggatctgggctttgcaatttcccatggctttgttaacacttagtgtctcaaagaaaattttgttgttgtgttccatgggagagttgatatcaattacaaatgtgcagttactggtagaagttcctgtggtttctattttaccttcagattttacttttagactgctccagtctacatctttttataagagatcatgtgaggacagttttttttaattctcttctgcaacctctggagttttgtaacttgcattattcttgttttacttaaatttaagcctttttttctatagtctgcaagaagttttctttagttgcttaatctatgtgctgcttttataggacttatttttcatctgtcatttcataaaatgtctctttttactttctccttattttggcccatcctttggctagatttttggggtggtgttatctgagatctcctatgtctatttgttgcttgaatgacccttcaggttttacataattttttcagccatccttttattttcttaagaatgtcctggtaacatgtttcccctataaatctacatccaaatccttccttaatttaaggaatcactacatgatagtgaacatttaattctcttttattccaatttgagttatcaatgtcagtgccaattattctttttcaagatatcattgcctgcactcttcacatattatcttgtttataatgacttgaatcatttttgtttattaacatacatagctacactcgccccagaggaatagggaactcacatatgcaaaagaaaatccatgggaacacccacaacacaatttatccatcatccagtattactgagtaaaggctcttgaaataagagttttcaacacaaaatagaatatgaaaaactataatatgcatgcaaaatgtgagaggacttggacatttaaaaaacaacttgtagttgaaaactaatgtgtagactaactagcagaaaagatataggtggaattgatgagcataaaattattaaataaaaacaaaaaataggagtacatgataaatattttcaaagtatgatatctgaaaaggctaatacaatacacttttgacaatttccaagaaaagtagaaagaaagaaagaagaaaatttttaaaatagataaagatactacacctacacatatgaagaaattttaaaacctcaagctgtagtcattaaatatgattattatctgaattttaaatgcactatttgactcaccctttgactctattattatcatctctagcagatgctcagtggtctgataggatcagtaacaacacagaaccattgccaagccacatggaagcatgaagcaaaagaaaacctcagtaatattgattttgtctttatttaaaatgttaatatgttgttcatcatggatttcgtgcattaattttgatttaataaaatattacattatcatttaccttgattactgagtttatttgacatccctttatgttcctcacctgaggcagcaagggcctcatgttcttcactctgagtcaggacctgcacaagacataaaaattttacatttatgtccacttaggcagttgaggtcttgccttctaagtttctctatagctcactaagaagaaatggtgttgatgtagggagagggctacactctggtagtgctagttccaggaagatgcccatgtgcccctgatagcactacagagtttagcaatttctgccttcactgcttattttactttttctcttcctcagtttgtttcccttccagagagccaggtcatgggtactggaactagacgaataaggattgaaaacccacttatgtaaccttgaatgagttattttacttgtctgagtctcaattttcttatatattaagtgaggataatttttaatttataagattcttgtataaataaatatgtacagaaagtccatcatacacctagtccacagcatggacttaataaatctcattatcttttcaactctatttctgcttcccattcttcaacttactactacaaagctaatccattagctagtatatagtagaaactgaaaaaaaattgaaatgcatttcttttattgctataatcacaaatatgttacatagacctacctcaatggtagagttcatccattgagttggttcagttatgtttaatattagtttaatatttcaaacgtagcaaaaatattttattagttacttataataggtggaggaaagtaaacaataggcttcttagaaacactctgattcctgatctaaaccctattcttcagtgaaattgttttgataatgtatacaatttcagaaatttatatttttgcttctaatatctcaatgtatttagttaagagaaataaaaataactttaactgactttataatatataaagtttattttaaacctttgcctttaaatgaaaaaaaataatgttattagaggttttatacttttctgtatataacatcaggctaattttcactagactgtaaatattcttatatggacaggcaaatcagtactgaatatacaatatattttcttttctatggattgtgcccaaattacatcagtttagaacaaacacgcttaattaaagccaataaattcaggtgttctatgattgttatacttttttgttttcaatgaaaaatagccagacctgttcactggggcttgttgtaattatggattttaatgtgaataagctatcatttgatgttccaccaagaaaatgtttttacattttaaagagctttaagatttgttatttgagttagtgtcatttgaataatggctgagagaacagtttttttttttcaattacacacgtatttcttcatctatttagagcctctgaggtcagactagattaaaaatgcacacacgcatttgtctcaagtaatggtggaaagttacctccttggtgactgcagtgtgcaagaatgtgtgtggtttggtttctaatctttcatttctttccaacatgaaaaaataacctccctcaggcaagaaaaaaacattgtacttggggagttgcctttgatcaaagaaaggggcaatagctctttcctgaaaatggtgacaagaatgaaaaatggaaagaaagatctattttaactagaagtaatgattttgggggaggaatagggagagtgtatgtgagtaaacaaggaaggaaactgagagtaacagtcactgatgtcagtttgtgaaagggatgaggctgaccaacatgccttgaggccatatcagaagattttagttttcatataaaatatttatatttccatctttttttcctatattatgagggcaatcaaaagaagaattttggctttgtacagaattttcctacgtattgaggaagtaaaaatgccaggtatattcacattttcaaggttttactgagaataaagtttatacctagaaatgattttaatacaagcaatgggctatcctaggaaaacaaaacggagagagatgatctaacaggaatgatgtagcagaattgacataaatgctgctatgctttggttctgtgtccccacccactcccacgtgttgagggagggaagtgataggattatggggtggggggtggtttctcccatactgttctcgtgatagagagtctcacgaaatcttttggttttaaaagaggcagttttttcctgtgctcctacttccatctcttctgccaccttgtgaagaaggtgcctgcttccccttcaccttccgccatgattgtcagcttcctgaggcctccccagacatgcagaactgtgagtcagttaaaacctctttccgttataaactacccagtctcaggcagttcttgacagcagtgcaaaaccggactcatacaaatagaaaagatattatcaatatcatcctccccagaactttcatgttttcactagatttatgagatatatttttcaatctccttgaaaatcaacacaagcccttcattatccagtctcattataaaataaagtatttgttttatattggcaccatgacaatttcaactaaattaatggcttcagcaacataaattattatctcacacttctgtaggtctgaagtctcagtgggctcaaccagttcccctgttcaacattcggcaaggtccaaatgaaggtgacaatcaacagggatcttattgggaagctctggtaagagtacatttccagatttattaaggttgttggcagaatttagttgtttgcagttgtatcaccattcccagtatcttgtacagttgtacgtcattgttttcttgcctgtgtcaactggtggttgctggtgtcagctcctagtaacctgtctccagacttcctatgtgagcctctacatcgcaaaacgagcaatgacgcctccgaaccttctcaggaggaatctttctaatttctccctctgccaagcccctctttctccagctgaagtatgttctctgctttcgaaggttcatatgattagattgggttcacctggatacttaaagatgcttgccctatcttaaggtttgtaaccttagttacagctacaaagtccattttgccatattcacagattccagaaatgaggatgtggacatctttgggaggctactgtgcataccacaaatactaatctcacaataatctgtttatggcctattttttggccattacttcactgaaattcatattctgcattttgttaagtattcagtctctgaggtgaagcacagtaatacagaaaaacctagatgattcaaaatgaaagacattgatagcgtaaaaagaacatcagaaatcattggtttttgagactaatgtgcgaaagtttacttttccatattttttgagagtatttttccttgtttttaattttggtatactttagataagatgaaatgcacaatttttaatcattattcaatgacttttgataaaaatacatgattgagccacccacaggccatagaacattgacattaccccagaaatttctcatgccacttaacaatcaattcccgtcaccctccagccattattcttgtttctatcactacagattgatcttgcccattctgaaactttatatggaagtgatcatacaatacatacttttggtgtctttttttgtagtatttttgagtagttttcaattatttgactatatcacagcttttacaacccattttccaattttgcgggcctttgagttctcttcagtttggggttatcaagaataattatactgttatctttatttctgttaggcttgaaaatatttcataatcatgtattcttagaataatttgcaagttatttatttaagcagtcatattgatatttaggtaaatttttttatttaaattttagagtacatgtgcacaacgtgcaggtttgttacatatgtgccattttggtgtgctgcacccattaactcatcatttgcattaggtatacctcctaatgctagccctcccaccttccccctaccccacgacaagccctggtgtgtgatgttcccattcctgtgtccaagtgttctcattgttcaattcccacctatgagtgagaacgtatggtgtttggttttttgtccttgtgataattggctgagaatgatggtttacagcttcatccatgtccctagaaaggacatgaacttatcattttttatggctgcatagtattccatggtgtatatgtgccacattttcttaatccagtctatcattgttggacatttggcttggttccaagtctttgctattgtgaatagtgccgcagtaaacatatgtgggcatgtgtctttatagcagcatgatttataatcctttgggtatatacccagtaatgggatgactgggtcaaatggtatttctagttctagatccctgaggaatcgccacactgacttccacaatggttgaactagtttacagttccaccaacagtgtaaaagtgttcctatttctccatatcctctccagcacctgttgttgcatgactttttaatgatcaccattctaactggtgtgagatggtatttcattgtagttttgatttgaatgtctctgatggccagtgatgatgagcattttttcatgtgtcttttggctgcataaatgtcttcttttgagaagtgtcatttcatatcctttgtccacttgttgatggggttgatagttttttttttccttgtaaatttgtatgagttctttgtagattctggatataagccctttgtcagatgagtagattccaaaatttttttcccattctgtaggttgcctgttcactctgatggtagtttcttttgctgtgcagaagctcttttgttcaattagatcccatttgtcaattttgccttttgttgccattgcttttggtgttttagacatgaagtccttgcccatgcctatgtcctgaatggtattgcctaggttttcttctagggtttttatggttttagtctaacatttaagtctttaatccatcttgaattaatttttgtataaggtgtaaggaagggatccagtttcagctttctacatatggctagccagttttcccagcaccatttattaaatagggaatcctttccccatttcttgtttttgtcagatttgtcaaagatcagatagttgtagatatgcggcaatatttctgagggctctgttctgttccgttggtctatatctctgtttttgtaccagtaccatgctgttttggttactgtagccttgtagtatagtttgaagtcaggtagtgtgatgcctccagctttgttcttttggcttaggattgacttggcaatgtgggctcttttttggttccatatgaactttaaagtagttttttccaattctgtgaagaaagtcattggtagcttgatggggatggcattgaatctatgagttaccttgggcagtatggccattttcatgatattgattcttcctacccatgagcatggaatgttcttccatttgtttgtatcctcttttatttcattgagcagtggtttatagttctccttgaagggtccttcacatcccttgtaagttgaattcctaggtattttattttctttgaagcaattgtgaacgggagttcactcatgatttggctctctgactgttattggtgtataagaatgcttgtgatttttgcacattgattttgtatcctgagactttgctgaagttgcttagcagcttaaggagattttgggatgaaatgatggggttttctagatatacaatcatgtcatctgcaaacagggacaatttgactttctcttttcctaattgaataccctttatttccttctcctgcctgattgccctggccagaacttccaagactatgttaaaaaggagtggtgagagagggcatccctgtcttgtgccagttttcaaagggaatgcgcccagttcttgcccattcagtatgatattcggtgtgggtttgtcataaatagctcttattattttgagatatgtcccattaatacctaatttattgagagtttttagcatgaagggctgttgatttttaggtaaatattttttaagattacctgcccacaaacataaactacctattgagcactgcttgtattttggtgggcatatgcacatatacactcagagttgaatgtggctactttaaatgacttctgccattctcataaaataattagcagattatccagtttataaacttgatgacattgctatataagatactggaaaacaaattccattatataatatttgcagagataagtttttgaaattgataagccacttttccaggattttttatactaaatacagttgtttggataaggacattcatatagatacctggcttcataactaatacaagcaatttatcataacatacccacagttaatcttcacttttgccctacaatgggtgctcttaaattactttgtaatatttttcaaggcacagaagtaaggaatggagagaaaaataagcctgagacgtctttgggctccaaaaatctttactcttggtaaccatagcagctcgtgactcaataaagtgataaaaagacttcatatttttgggttaaaaaacttgtatatgttagtttttctgacaaagataatcagatacgacaattactaaatcgggatattaaaactatcatctcaggataagaacaattacgtattttcctgttgaaactttagattctttgttgttgtcattgtcccttaaggaaaacctatctgtccttgtgccccagtagcactccacatctttggcagatgtgagtttatattttttatcactactcttgtgcttgaagagcatgctttaacatttcttgtagtgcttttctggtggtaataaatactttcacctattattttaatcttattaaagtgttaattttgccttttgaagattattttcactggatatataattctgaaatgatttattatttcttctctatactttaaatgatttttagattttcatttagcttacatttgttctaatgagaagtcagaagtattttttatcattattcccttttctattacatgtcttttctcccacctacaattacgaattttgaattgtatgactgtgttgatattctacatctctccactctctttcttcttttcctctaaatccttggacatactttaataccagcttaataatgcttgtttttattcttaacaacatcctggctatcttaggtctgtttctattgcttatttttctcctaattttctcataggtttctgctatttttgcatgtttaataattgtttttgttttatatttgacattttcatactatattatttagattctagacttccgtctttggtagaagtgtgttgaattttattttgagcactcagttaatttactggcacattagtttgatccagttggtccttatttttaagtttttaaggctgatttaagagtatttcttctgataggagtagatgagccccacttcgcaagctgactttcctgagttcttatttaaacactgggagatgctcagtgagtcttttcactttgactggttgaaactctaatggctttcaacattgttgaaccagtgaaatcctcattccgctcattgccccttagaaactgttctctctgtggccttgtgaaatcttactctgtacatgcataatatgttgttcactcaaaaaattcaagaagactcatttgtagatttttagatctctttctcagttcgactctttcttctctggaatgttcttcataaattccagccacctcagctgcatcctaccatcggtttctccattcagaaaaattgctgtgatctattcgggctcctctttcctttcctgcagttttggaagtatccctatataaaaggccagctttaaatgtggagttcacttcaaggatcacgactctatgctgtgtgttgtacaatgctttaaaatgggcacatggtacattttgtctagttttatagttgtttacagcagaagattcagtctgaaatccattattttattatagccagaaccagaagtcaagcaatctgtttttaaaaaagcacatattgtgtacctgctaccttccatgtaccataccaagtgtgttcaaatacatagtcaagtcagcttttactatttgttgttcctcatgaagggcttacattttattttattttattttattttggagagagggcttaggcagatttttattcaatatctatgcatttgctcatgctgactgtttctggcatatttttacatacttcctaaatactgtttgtcttgcaagatttatggcacttcttttttgcatgtttttctaattcatctccaaaatcaacctttcccaacttcatttgttcataagatacttttaaattcacctctgttatagcatttaccctgttgaattatagctatctctgtatgtgtcataaaaacccaggaaaattttaggctgcaactgccactttcctctctttgtgactccacttgtcacagttacaagtgcacatattaggccatttctaagggttcattgtactgaatacctgctacctaatttaactcacataataatcttgtgaggtatatagtataattatcattatgtttaataaacaaattgagtctcatataagttaattatttattctagtttactaatgtcagtgatagaactgaattctgagttcaagctccgtgtttgcaactccaaatctactaatcatcactataccacatttatcatgcattgccttcactcttgttagcctgacaaataggaaaataatacaataatccttaaatatcagtactatctcatacaatttcatataactcacacaattttaatcacaattgtaaaggtctatacagcttaattagtctaactccccattcaacggccgtattttctctacagtattcctgaccataagactttgctttgaccctgctgtttgtgtcccccatcccttaaagcaatccatgtatgctagtaattattaattccttagagtagtttacatatgccatcctaaaacttgtatccaccatttctttctccacccttaatggctgtataaaatttgtccccttggttattcattggcaagccctccaatatttgaaaacaactaatgttgccttaagtcctctttctttcaaggtaagcatctttagttgcttttctttgctcttcttcttagattggtttctactctttacatccaatattttctgtttgtagacaagattttaagacatgtaaaactatgaaacacgctgtcctgtatgatcatagtaatctgtgaggctattaatatcttaggtgttattacaaagcttttactttccctttccaagatgaacagcacagcaacaggaataaagaaaaatttccctctaataactagaagagttagagtaactacgatttacagatgaaaacctagggccagagccttcctgtaggatattagacttccttttcaagaggtggccccctatataatatttttaaactatctgccctcttccttcaatcctgtcactctgttatgccctttgaaaagagacagtgaaggagttatatttggaaatatgccccatattttttctgatcactggaatgcagaggtgaacatgaattttatgagtctgtagagttagggattacatattttaagtaattaattctacaatagtaaaaatagttctcaccataaatcaacagctgaatggtgggagttggacataatggagaaaatatggactaaagagattatgaataggtattgtagagaatcgatattttaattgggtgaattaagtaaactcttggatggattaaaaggttagattctggttggatgtagttttcccttatgttccagaaatatgtcaactcctgatttacaacaaaggcccaaattcacgaaaagagaaagacacctccttccctatctagtagaagaaactaatattgccatcagaccatccatatgccattattattttatattactcagattataataggcagtgaactttcaataatatatcacctgatcttttggtgtttatatcagaaacctgtaatctttctctgataaagagaatgagcccatgagccaatatacctgacaaatgtgtaaaggcaggggcagtgcccaggtgtccctgagaagtctatctctgctgctactttctcagggccgcagagggtacatatctcatgcaagcacacacttgcactcacatgtgtgcatgtttaccctctggattagcccaattctccattcacctttagttttgcctcatattttgggagttcagattagaaaactgatctaatccaccaacatttctggcatctctaagcttacatggtatcaatgacctcatgatgctttagatttatttttaatatctgagtatttactttcaagggttaattaaccttggtgaaatcttaaaatcttcagctaaagatatactacatgacaggcatacaattttggaactgctttgttatgaacctatacaaggtaaattggcagtggtcacgtattaaagtagctgcttgaacaaaccttaatggcacagcttccatcccaggacttattaagatccagtggttgcttaaagagaaattagtttgtttgctataatttgttgaggaaatcaccatacaatatgcaattagagtgcacatatttcttataagatacctgtggtaaagctcttcctgtcatcctaaactggagaacatagcgaaattagtttcatcatgaaagtttagatgcagctggaaattcagagacaattgctttatcttaaaagctattttcacttttccattgccacatttaaaagttaaggtttatagagaaatattctcaagtgattatggaacaagtgcaggaaaatagaagcataaaaatatgtatttcaaggcatcaattctaattctgcttctaaaaatagtcagtgtgcaaagctgcagttgctggggtattgcttcaatgaagctgcatcgtcaccatcaactacattttcaggatccacaatcttcatatatatactttattttttaatattatagaggaagaaagtgtaataacttggtgggagcttcctcctatgtatgatataggaaggtagacaaattagcatctgcccatgctatgatgatcacaggaacaatcttgcagctgacaatgccaagaaattactgtccttgaataacgtcaagctttaaatttttgattactgaaatttcagtaacaaatattgcaatcaaaattgaatttcataaaactttggattcattctacaatagtaatattcggctcaggtgaataatgatgttaatactcagcctttcagtgttcagccaaatgtttatttggtgcatctctactttatgtgtatttgcagattttaaaatatttttttctgctgtgtatcatcataactgatacatatacacaaacatacaaaatcttatgaaaggcaaatgcaaacatatacacaaagaacatgttataggaaaatgtgaaaaaagaaaacattcaaagcagagatcattacataagatgacaaaactcaaactaaacatatcttcactgttatatgtaatgaaataaaattaataattaaagcaaaagacatattggacaagaaaaaatgtgttgataattctcttagctccacccaaatcctttatctgactttcaatactctgttctgtgctccaggaggtgaactcctaagactttatcattcaggttcctctgccagctagctcctagttgaattggattaatgtaaggcactggcagtgggtcagatggcagaaggagagagagaaaaatcctgatatctataccctgctttcttcctaattctgcatgaatgtagtttctaccagataactcttctccacagcaccagctctttctaggcttcagtaatgcaaattatacaccttgtcccttcaggtctggggatggtaacagcattccactgttcctggtatctgagtattacagcaacctttgctggggttttaaatcctgctctaactgaggtaagtagtccattcaccaaagtctctattgtggaccattgaagcagatttctttttcttttctttttttcttttttaataatagtgatggggtctccctatgttgcccaggatggtcttgaactcctaggctcacgtgatctcccaccttggcctcccaaaatgctgggattagaggtgtgagccaccataccaatcctgaagcagatttctgttttatacaagggtcctaattaatgtagaagctattacaaaatggggtatgtaagaatatctgtttcttagggaataataggtagctataccttgtactgcctaccacacagaaagagcagagtgactgagaggcttgtctggattttggaagtaacatgactacagttgtgtgtattcaaacctattacagtctaactcacaagtctacccatttagaacaaagagctctttgcagcaggttcagtctgtgctgtaggctcctctgctgcgtgggtattttgactcagtagatctaagtatctggcttagaatgatgctgtttgacacttctaagtaaccccaagaagacaatcataattcatctaactaataattttggaacaaaactaggtccccttctgccaaatatttttatctatttaagaagtctggcttgtcaccatgtaactatgtgatttgaagtgttcaccatcaactgggtgctatccaagttatcaaatcttcaaattgtgcttgaaaattagcaggttattataaaatggaattgatatgggtgacattaaggctgaacaggaaggggagtcacaagtatattgaatgagcaggtggttcagacctttattagctattcctgcttagttatcaaattttcctcaactctcattcatattcaccaggggaatcccctaaagagaaggtgctcaacaatcaggtagattaggtgtctggtctttcctgtggatgtctatcaagctttctcccagtgatataggtgcttacttagtggaaccatgcaaaaagtaatcatagttgcatggatggtaaatatgcataaactcagcacaatggactaccctttagcaaccctgatctgtctactatcactgagtgtccaacttgtcaataccaagggcaaatgtgttcctgatatggcaccatttcatagggacaccgaccaggcacctggtgccagggtgattacattgaatcctttatattgtggagtaagcaatcatttgtccacataaaaccaaatacacattctagaaatggatttctcttctttgccctcaatgcttctaccagtgtcaccatatgtcaccttatagaatgccttattcattgccataacatcccatactacattgcctttgacaaggaaactcatttaatagcaaaacaattgttacaaaagatccatgcccatgaaattcatgtttccctacatgtcccatcaccagtaagcagctggcctgatagattgatggaatggcttcctaaaggctcagtttcaatgccaggtgtgacacaatattgtttgaaattgtggtgctggcctaacagattaaactattagccaatacataagccatatttccaaaagctagaatatgtagggtcaggaactaagaagtagaattattttacctgacattctatttacagaattttatttcccttcctggaaacttgtatttagtagctttggtggttctcttttccaaggaaggaacttttctttcaagaaatatagctatgtttccattaaatttggacctgaaattgcacccttgctatttttagctcctaatgccattgacctaactggcaataaagagtttaactatactgaatggattgattaattctgattaacaaaggaaaattaggcaagtaggcctagttggaatccaggagatctgctgtggagccttttagcacttatatgtcccataaagagccaccaaataaagacagtatcactagggactttgatcctatgaaatgaagatttgggtcatcccatgagacaataattcctgtactatggaagtagtaaagtttgcttgaaaatggaatggataatagaaaaaggaaattatgatgataaaatttagcctcatgaccaaaagtgaaaacagtagtagctaatttacatatttattttaactgaatatttctttcccctcactctccttgctatctcatataaagagtactgatagtgggtgacattaacatttataatccagttgggaataagactgaattgctgacaccctgccacaatttaaattatgctaggactgtggtctacctgtactggagatccaattttcttaatctgagcaagaggcaagaatgaatgtgaagtcggagtaatgttctggtaagtttctattgacttcatggatttattttcttcccttgtctaacttgctctgtgctcatggatgcagagccatgcagtcaacatcattcagattcctttgtggcctgaatttcagcagaaggcactcagtgggaggctcctgtagggtgcaagttaggtggagaggagaatgcgttatttcttccccgattccctctgctttggttctgtgcttctgccaggggctgaatctctccataactagaactcctgctatgcgacctttccttgcagctccagaactcacttagctctggtaatgctatcttttctcttgtccctttatggcttcctgtggttggtgtctttgttcctctgcatctctctttctctcttatttttttaaccctagctacatctccgtaaacagactctttaggtttttgatagtggaaactctaagaggaatcatgattccttccaggattacattcagtaaaaaagccaatgatttattgcatacaagcagcaactctaataaaaattaactcaaaagcttgaaagtgaagctttgggcaaaagaattacaggcaaatggaaattaaaaaaaaaagcaaagatcacaatatttaaaacaaataggttttattcatggttggtaaaaaatatgaagtaggacaaagacactttgtatcaataaaaaggtcactataaataagtaactgtcataaatatttattaaatatgtatgcaaaattcagaaagcaaaaacttcagcagcattttttaaaatacaatttataatactattttttcagctgatggaagatcaagtgaaaaaacataagtgagatttaggaggacataagcaattaatggaggataactaatatgtgtatatttattcaaatactcatggaataatagtcaaagtggacaaagtattgggcctcaatgaaaaccttagcatattccaaaaagtaaaaatagtgtataatttagtccatgatgacaatgtaataaaactggaaattatttctgggaagtgatattgcctgcaattgttaatttctacatttttaaaaataattatctattattttgttcagtaaacatcgtactttttatagttaaaatatcaaaatactcaaatatatacaaaaagttcataatatataattttaaaaataccatacaaatatcaaattagaagaagcaaaaacaattgtagctgtgctaatagccctcaatgagttcagaattttataattagatattgaaaggagggtaagaagtacatgtatagtaactggacagtgcacagccacaagttgggtatagccctataaattgtctattttaaagtgtacatgtatagtaatttgctattcagaaatgttgaatcatttaaacataattttattattatggaaacagtatatgtgcatcagagaaaagtttttaaatgcagaggagcaaaatgtgttgaaatagtcctataaacaagaaagcaccattgttagtacctttgcctctagccttacatattatttttcatcaaatatacactttgtaacctctttttcagtcaataattttcacatttttattttcatgcattttcattatatataatatccatgctgtatttagatgtctttaattaattaaacatttttcttcagggctgatttctttaaaccagtctcagtgcagtcctgcacattatatctaattgtccaccccttaattttttttaatctagaattacccccctttttaaatggtactgacttgttgaaggaaagaggccaattgacctacaaaatggcataccttgaggctttgcttgattgctttctgtgtctaaatttacacctaatgccttaatggctgccagttaaacacgcttgactagaataaatcacaggtgaaattttgtacctcatgttgtactacatcagaaaatttgtaatgtcaggttgaccgacagttgagacagtaaaagtgatcattggtttgtgtgatatctgatatctgatactgatgtcatccttcagttagattgccccttttgcaagtatgggatgctatgaaggtctacttccccataagccttcacttaatgaattttagcagcaatgtttctctttcataagcttccactgaaatataatataattgaattgtgcaaatcataattgtatagctcaaggaattagttcagagtgaacacacccatgaaactatcaacctgggtcaagaaacactcaaaggacacataggaggctcctcatgccccaaccacattatttccctctcccttctcccaaaatgtaaccactctcctgatgtcaaatggcaaagaataatttaccccctataaatagactaatacggaatgtgtttgtatttgtttctcttgttcaaaattatgatcaagattcacgggtgttattgtgtgtatctttatcatattcattttgatagatgtaaagtagtacaatctattcatacaccactatttattctttcctgtcttgctagacattgctttctttctgtggctaaataatccatttgtgaacattgttataagtttctattactgcatatgtgcatacaattctgttgaatgcatacccagaaatgaaattcttggatcatacaggatgcatgtgttcaaatgttgtagataatatgaaacctgtttccaaagtggttgtttgaaattcatcctgatagcataagagatttccagttgcttcaaaaccacatcaacactttaaattattttctatcttttaacttttctggtgaatgtgtagtatttctgctgatggacttaattattatttaaggacaagtgaggttggacgtcttttaaaacatttattagatatttgtataatctcttttgtaaactgctttttcaaaatatcacccatattcctattgggtggcctctcttcttattgttcgaatttttatgtattctgcatataagccatttgtcaattatataaaccacaaataatctagtttcacttgcttttgctctcttattggtgcctttttagagaagaaaacactttttaattttaatacagttgaaatcattaatgtttttcatatcccgcttaagaaatctttgccttcccagaccctgaagatattcttttttatcttatacaattattgcttttccattcctgtttacatctacatgaatgaaatggttttgtgaatgaagtgaggtaaaaatctagatttctttttccatactgatacaagattctatactgttatattggtctatctatgcttgtgatatttacctttcttcattactatggtttatattatagccttgatatctgggactgtaagtttgttcttttttgagatgttagccgttcttagccttttgcattgtcatctaaattctagaattcacatgttaatttttgaagataaagaagcctcttggaactatgattgatgttgtaatcaacagataaatttaggaaaatggacatctttataaatttaagttttcaatttatgaacacattctatctctagatttatttaggtttcattcaatactacccaataaagttatatagttctgtagagattttgcatatatttaattaaatttatctcaagtatttgatgttttgatgctgttcaaaggggtatctttttatattttaatcttctatttattgtataaagaaatacactttttaaaatattgatcttatatcagaaaccacacaaaactgtgatattaattctaataattaagtagaaaattatcttggacatttcataaacacaaatgtatatgtgaaaatgggagtggcattttacctttctggtctttagtctttactccttgccatcttgcactggctatgaatggattagaataaagtgggatggagtaatgataataagtaatctagcctcatattttatcttgcagacaaaatgtttaacatttcacattatgaaggattttgctgcagatttttttcttttttttgaagattatgtttatcaattaaaatgctacagtttgctgaggctttcaattctaaaaaatactattatcagagattttagacaatcatctgatttttctttttattcagcagtacattgcactaatagacttttaaatgtttttggcaaatttgagcagaaggaggataacctttcaaacacgaaagttgcaagaaaagtataagaaaccacaaagtattttactgatattttcagattcaccagttgtttatgttttgctccatttatttatgacttttcctcctctcttattcttctctttttttaattatttaagactaatatgtcaagtttgcccttctaccctgttagggtttggctgtgtccccatccaaatctcatcttgaattcccacatgtgtgggagggaaccagtaggaggtaattgaatcatgggggcacgtctttcccatgctattctcatgatagcaaagaagtctcaaaagatctgatgattttatacaggggaatttccctgcacaagctctcttctcttgtctgccaccatgtgagacatggctttcaccttctgccgtgattgtgaggtttccctagccacatggaactgtgagtctattaaacctcttttcttttgtaaattgcccagtcttgggtttatctttatcagcagcatgaaaatggactaatacatacccctaaatgaatcaatttgactttctaaaaaaaggacatctccctataaccaaagtataattatcaaaatcaaaaaagtttactcattgattttttaacgttaaaacatccttacatttctggaattaaaggaagtttgttagtctacattaaacttttaaaatatgctactgaatttgtttaaaaaatatttgcataagatttttacttcaatttgtatttgaagcctggattgtgtttttctttcatgtactgccctgtaagatttcttatcaagataatgataatgtggccatcataaaatgtgttgaaaagggtttctgcaattacagaaactaagtgttatagaactctaagtgtcataaaagaattactattccattattaaatctttagaagaatttgcaggcaaatcctggcatggactattccaaaattgaatatgttaaatatttaatttcattaatgtaaatcagattactcatattttggttttttccagtgtctactttggtaagtagtatttttcttagaatttgtccattttttctaaattttgaaattgttgccaaaatttgttcataatatccttaaataaattttttaaaatcacatgtattgatgtataatttacattcattagaatttactcttcttagacatccagtttgatgattattgataaattacattcattagaatttacccttcttagatatacagtttgatgattattgattaatgtacataatcatataactaccactgcaatcaatatacagaatactcccatcacccccataaattccctcaatttcctttgtatcaagtctctaacccctacttatataccctggcaaccactgatctgatttgtctctatacttttgcctttaccagaatatcatataaatggaatgaaacagtgtattgcctttcatgtcttttcaaaattatgttctttcatggattttaagtttcttctttttaaattgctaatattaacctactatctctatatagaaaactttgtttatcactagctgattgatgtacatttgagttgtttctaggtttaaggtattgtgaataatttgcatatagagatttacatgaacttcccttgctcccttttttgggggtaaattcttaagagaggactttctgggttgtatgtaagagaatatttaaaatgataagaaactgccaaagtgttttccaaagttgctgtatctttttgcaaccctgctagcaaactgagagttttgtgttccacatcctcactatcgcttgatactttcagttgtctataatttttaaattttagccaatttagttatatgtgtaggggcatctcattgtggatttaatttacatttttctagtgaataataatgttgatcatttcatatgcttactggccatttgcatatctttgtgaagtgtttgctcaaatgtttccccactttaaaattttaaaaatttagaattattttatattctgctaatattttacaactgaagttcacaaaacactgaaagggttaattcagacacactggcagaaactgcagtctctgataatctatatatattacttaccaataattggtacagagttgtgagtattgattaagaagcctgagaaagaactaggacaaagcacttctgagcctttagataacttattttctttgactggatttgccaaaacaaaattgatctttggctatatgtttttggtcatatttcaaagaataatatctttaggagataattccaaatatccagaaaaatgcttatctcgaaatctacttctgaacctttaaacttgacccaacctcccacatatcttttccaggcaattactttggctttctctaattcattctctagtcaggatcttaacctttatttttttttcttttccccagctttcttgaactaatagtatctgtgaaacatattcttggaaagtgaagcaaacaaagaaacacacagttaaccaaaagttaacaatttgataacaatatcatggcaaatgttagaataccataccagtgtatgcttctgttgtttgtttgcagatctaatgaaatcataacatacgactctcagaaaacagcaaggtaaagatggcttcttaaagatgtcctagacttaacagcaataaggttctaggtaggagactgggtccaattgctttttaacttttaatccaataagattttatctttattagaaggaattatattttttaaatggtagttaaaaacaggtaagaaatgagcgattattacacaacagtgcactctatagtatgtgataaacgtctctctcttttgacttaacagtctgaattaaaatgctactatttcattaatcaatatgatatttaaatcaccaaattaaaaatgaccactatgtgttaaaattttctctgatgacacttcactatgcagaacatggtaattactttgagaaatcagctattccaaggtaactgggcagttacaatattttatcaggtaaattaccagtcaccatcaacattcatcacagactcatttggattttattacagattgacatttacttatttgcccaacttttaaaattacaactgttgcacgattgccccagggtgcaactgtagaaaattagcacactaattacattaattatcataaataaaaggttatcaaagagtagcatgtaataacatagcattttttgaaagcaacttagggcatccctataatacctcaaatttaggtattacattgaaattttcaagactgctttacctctattgttttaatctttaacacctcagctataggaatgttattattaatgccatttcagaaatgaagaagccacagccaaaacagctgtatgatcgccctaagatcatatacagctggaacagtttaaggtcaagtcaaaaaccacatttcctaaacttccaacattccatcttttgcccctatatttttctgccttttagggatgaaaagtaaaatatttatcttttatgctccaatgtatcaacactttaagtgaactaaagatccaaaagtgagtctgatctgcttgctttttcccacctctattgctgccgacctatcaagcaaacatcatctttcctctcaagtacctgtaacaactcccttccttcttgccccataaaaatccatattatacagagaaaaccaactgacttttaaaatataaatgagatcatgccatttatttttgcttaaaatgatctgtggattctcaacatactggaataaaatctaaatcaccaagtcctataaaattcatgtaatctgaacccctctcccgtttcatctcctatcactctgtatcccctcattattctgcttttttttttgtctgattgttgagcctattgccaagattgagcctgcctctgagtctttgttcttctattttactctgtttgaaatgttctacccccagatttctgcagaactggtttcaaattcctactcctcaaagagattttcttaaataactgaacctaaactgacctttcctctttctccttctttcctacagcctatcctctagtcattccttatcacattctgttttatttttatgccatttttctttgctttcagaagttatcacaccttagaagtccacagaagagtttgtgtatcttgattactatctgtaacagaagctatgcattcttcactcctatctctaaaggctgctctggaaatcacctgcaacttcagttgttgtttctcttatattctaaagagctttctatctcaacatctctcagcctgaggccattctctgagtattattcctagcagacaagaaatgccaggaagttaagggctcaaggtattaggatggtgcaaaattaactgtgggttttgctattaacacaacctttagtccatagataaaatcaggaaattactatgtacacggctccttcattcctcaggtggccaattataaaggtgtgttcgacgtctttcacagtctccagcatgactgaaccctagttgcccacagtagaaaccagcttattcatgtgcacttcattgcctttcatttctctatctattttgttgttaaataaaacaaaatcacacccacttccctgtccccagtgcctgactggactcatcatacatactattgtcctcttccctcctctttgttttcaccattttccttccccactggcttgtcttgtctccactaataatcttctttctataacttccttctctaagccatatgcttttatctctcaccaatgccctggatcactgtcttgaaggtggttatctccacacggcctttttgtctccaagtttcgataactaatactgcccttcatcccttcaggcctagagaaggtaacagttgcagggtacatacagaattatcccttttggtttatctatacactatccacagcttttaatttactcttttattatattctattcaaattaaacaacttaagtgtattgtgcattttccctagtacactgataggtaccatttgtacattcaggttttagtgtatattcaaagagcgattttcctttctttcttcctatgagatttttcacttatttcttgaaattggcttaaagaatacagcatatccaggttttaggagaaaagagactcagccctaaaaacaataatattttgctatgcactaaattcacaagaacaatttttctttatctatttctgcttcttttttaattcctagagaaacaactttttgtctgatatctcctctttcttcagaaaccttatttttgttatagctcaaagtaaagctctcgggcttctcttttggaggcaaaccttctctttggagtagcataaagacatagtactcttatttacttctcttcagttttattttattttattttattttatgaggaattaaatgtatagagtgaaatatacacatattcaaggtataaacccaagtgacacacatcttaatctgaacacaaaacatttctttcacctcataaacttctctcataccgctttccagtcagtattgctgcaacataaggcaactggtgatgtggtttctatcaccataagttagttctgccagttcttgaacttcatataaatgaaaccatagcgcatgtaatctttgggtctagcttctttcactcagtgtagtttttgaaatttgtctgttgctgtgtgtcttgatagtttgttctcttttgttactgaacagtgttgagtaaaagagtcaaactctgtaaaatatttgaagagatttattctgagtgaaatatgagtgaccatggcctatgacacagccctcctcaggagaccctgagaaaatgttcccaaggtggttggggtttaggttgattttatatattttagagtgttgaaacacactaaatatgtcctgagaaggactccatacttctatatttgaatctttgtggacaaactgcaacctaacttaataggtagacaaggttgaaaaacctaacttaggagtatgcacctgtaacaatagctgagtgtaggccaatcccagcaaccatacttcaaccactcttacactactgagtgttcaaactgtgctcaactaaggcaaatgctaagctgtaaccaattcagttgtttctgtacctcacctccaatttctgtacctcatttccctttttatgtctataaatctttcaccacgtggctgtgctgaaatctctctgaatctgctgtgattccagggactgccctatcatgaattgttgattgttgaattgaacttctttaaatttaattcagctgaagtttttcttttaacagatggtgtcagaagtaggatctgaagaagagacttaacaatccccaggagtgctgagtgaacaagcaaggtacctgcaaggacctacttttgtcccttgatctctcaaagtggctggggatcatgggtaagttctctcagatttcagaactccatggatttgtgtttggaattctctgagtttctctgaacaaatttgtgatccaaacagtttgaaagttaggacagaaactgaactaggtccaggatcagatttgatctggtaattaactgacttggatccagctggaggcctctctctctctctcttttttttttttttttttgagacggagtctttctctgtcacccaggctggagtagaggggcaagatctaggcttactgcaacctctgcctcctgtgttcaagaaattcccctgcctcagcctcccgaggagctgggattacaggtgcccaccaccatacccagctaatttttgtatttttagttgagacacggtttcaacatatgggccaggctcatcttgaactcctgacctcaagtgatctacccacctaggcctcccgaattgctgggattacagacgtgagccaccatgcctgtcccagttagaggccccttacctttggctgagacagaaagaaaatgttagtaaatggtaatattgcagtggttgtaaaatttggcttttagaaatgcacagggattcttgagttctacaccttcatttcatttttcttgtgtagttaggtagaaaaaaaattattggctaagtcaatcaagggaaccgaagagtaaagccaatatcttaggtaaaaataggatccttaatttttgaaagtctgagtttcttccacctttttattttttattttatttatttattcattattattattttgagatggagtctctctctgtcacccaggctggagtgcagtcacgcaatctcagctcactgcaagctctgcctcccaggctcaagcgattctccttcctcagcctcccaagtagctgggattacagatgcgtgccaccacacccagctaatattttggatttttagtaaagacaggttttcaccgtgttagccacgatggtctcaatctcctgaccttgtgatccgcccgactcagcctcccacaatgctgggattacaggtgtgagccactgcacccggcctaaagaaacagaattttattaatttatcagctgagttagcattacagttgctaactcagtaactgagtaaacatcacaatggcttacgaagcatttgccattgtttgaggttgcagtgaggacaacatgaaatacctgatgaaaaaccttcacaaaacctggtctctttccaacagcttagctatgtgagaatagcttttataacatgacaactctaaaaataaaaccattttaaagttaaagctgtccttccagttgctgtttcaaactttatcccaagaactgaggtgtcgttcagtaaaaggcaactacagccttctcaggagtaaggctaagtacttgttttatgttttctggtgatgaagttatttcttgtctttgagtttacagtgacagctataaaagtgattgtcaatagtattagtataatttaatttctaatagaatgtgttttccatgtatgttttagtcagagctatgattttcttaataataccagaacttgttttgtgctctgtgatgatgatattagtgatctgtactctcagcagtattttacagtacttcagactattaatacactaatctgtgtttttggctgggtgctgtggctcatgcctgtaattccagcactttcggaggctgagactggtggatcactcaagctcagaagttcgagacaagcctgagcaacattgtgaaaccccctctttactaaaaatacaaaaattagttgggcgtggtggtgggcacctgtaatcccatctacttgggaggctgagacaggagaattgtttgaacccaggaggcggaggttgcagtgagctgagatcacaccattgcactgcagcctgggcaaaaagacggaaactccatctcaaaggaaaaaaaaaagagtaaatagtaagatcgggcatggtggctcatgcctgtaatcctagcactttgggaggctgaggcaggtggatcacctgaggtcgggagttctagaccagcctgaccaacatggagaaaccccgtctctactaaaagtagaaaattagccaggctacgtggtgcatgcctgtaatcccagctgctagggaggatgaggtaggagaatcgcttgaacccgggaggtggaggttgcagtaagccatgatcactccattgcactccaccctgggcaacaagagcgaaactatgtctcaaaataaaataaaataaaatgaagagtgcatagtattcctttatgtgtgtgtgtgtatgtatgtgtgtatgtgtgtgtatatatatatatatatatatatatatatatatatatatatcacattttctttatcctttcatcctatgctggcctccaaggttgctttcatatcttagctattatggataatgctgcagtgaatatggtagtgcagttatctcttcagtatgctgatttcaattcctttagctatacacacataggtgggattgctggaacatacagtaattctatttttaatttctgatgaatctccatgttattttccttaatggctctattaatttacgttgggaaataaattccttttttttttttttgagatggagtcttgctctgttgcccaggctggagtgcagtggtgtgatctaggctcactgcaagatccacctcctgggttcacaccattctcctgcctcagcataccgagtagctgggactacaggtgcccaccacctgcctggctaatgttttttgtatttttagtagaatgatgttgggaatggactggtttattcaataaatcgtgttacgtacattgactaatagtgtgtaggattgaagttatatttactgaattctttacattaaggtatagtcaaaacagactgaataattaaatgtaaaaatgatctggagaaaaccttctcgttgtgttttgttttgtttttttgagatggagtctcactctgtcatccaggctggagtgtagtggggcgattttgactgactgcaacctcagtttcccaggttcaagtgatactcctgcctcagcctcccaagtagctgggattataggcatgtgccaccacactcaaataattgtatatattttaaaataggaatagattttctaagctaaactgaagataaatgctaaggaaagagtgagatttgacttgataattatgtgtctgaatgaattagccaattaataaaatgaaaacaggccaggggcagtggtgcatgcctgtaatctgagcactttgggaggctgaggcgggtggatcacttgacgtcaggagttcaagaccaacctgacaaacatggtgaaaccccatctctactaaatacaaaaaagtagcttgttgtggtggcacatacctttaatcccagctacttgggaggctgaggcaggagaatcacttgaacctgggaggtggaggttgcaatgagccgcgattgcgccattgcactgcagcctgggcaacaagagcaaaactctgtctcaaaaaaaaaaaaaaaaaaaaaaaaaatcactgccccaccaactttttcacatagaatgattaaggattccagagcccatgctacctctaggggctcctacccctcccacactacacatatatcttgacagggctagttacagagaagaaaaggcccagtaaattaatatcacaatcattgccacatacccaccaaaaactcaaattaaaattttgacaaaattaagtatcaagaagaatgcgaagatttgggaattatcagacattgtaagactgtcagttggtgtgttaacattgggatgaaaccaataatagctaataaaatggaagatatgtttacgctgtaacctatggtttcacctcttgttttatactgttcactatacacactatacacaccaatggtaaccaaatataaatacacaaatgttcacaacagcatcatttgtaactgacaaaaatgaacacaacccacatgtctaccaacaatgaagggatacacactggtgtactgtatttttatttttatttttatttttgagatggggtcttgctcaggcccccaggttggagtgcagggtgcgatctcggctcactgcaatctctgcctcccaggttcaagtaattctcctgtctcagcctcccgagtagcttgtcttactgatgggtgctgccactcccagcaaatttttgtattattggtagagacagggtttcaccttgttggtaaggctggtctcaaactccctacctgaggtaatccacctgtctccacctcccaaagtgctgggattacaggtgggagccaccacgcccggcctttttttttttttttttttgagactgagtctcactctgttgtccaggttggagtacagggtgcaatcttggctcactgcaacctccaccacctcccaagttcaactgattctcctgcctcagcctcccgagtaattgggattacaggcacccaccaccatgcctggcctttttttttttttttttttttaacagagtctagttctgtcgaccaggctggagtgcagtggtgcaaactcggctcactgcaacctccacctcccagagtgattcttcagcctcagcctcccgagtagctgggactacaggcacatgccaccacgcccagctaattttttgtatttttagtagagatttggtttcaccgtgttcaccaggatggtctcgatctcctgacctcacgatctgcctgcctcggcctctcaaagtgctgagatgacaggcattagccactgcatggcctactttttgtagttttagtagagatggggtttcaccatgttggctagggtggtctggaactcctgaactcaagtgatctgcctgcctcagcctcccaaagtgctgggattatagacatgagccatcgtgactggctgtactgttttaatagaatgcagaaacaatgctaagtgtgaatattaaatacttaatattgggtaaaaggagccagaggcagcaggatacagactttactccaattatgtaagagaaaaatcaggcaaaaccagacttgactttaggcttctaaaaaatgcataataaggccaggcactgaggtcaggagttcgagaccagcctgaccaacatgtaaaaccccgtctctactaaaaatacaaaaattagccaggcatgatggcagatagcccatgcctgtaatcccagctattagggaggttgaggcatgagaatcacttgaatccaggagttggaggttgcaatgagtcaagatcatgccactacactccagcctgggtgacagagcaagtctccatctctaaaaaagaaaaaaaaagaaaaagaaaagaaagaaaaaaatacataataaaaagagaacctaggagagaaatgcagatatccacaggtaatgtggttatctgttatatctgttactaataagggatggaagactttaggatcatttaggggcatacagaggacttcttggtggtgatagtgctctatttcttcacctggataggtatcacacagatgtttatttaataactgatggatccatatgtttgtttgcatatttcacaataagaatgaaatagaggaaaggaaggtgaatggaaagagatttctccattcatcaaaattttaaagtcatgtttttcctcaggttcttctccaagttcagtctgaaatggtgaaagcagccaagtgcggtggctcacgcctataatctcagcacttttgggaggtaacagagtgagactctgcctaaaaaaaaaaaaaaaaaaagaacaacagagtagttatcaggtagagaggaagggaggaaataaagacatgtgggtcagagatacacagtagcagatatgtaggatgaacgatcctatacatctatatacaacatgaggactataggtaataaaattgtactgtatatgggattcatgctaaataagattttaccttcccttgccacaccaaaaaatgtgcgtatctgtgatagatatggtaatttgcttcactatagtaatgaatttttactatctatatgtattctataacatcatatgtgaaccttaaatatacacaataaaatttattttaaagagaaaaaaatggccaggtgtggtagttcatgctggtaatcccaaaactttgggaggctgaggtgggtggatcacgaggtcaggagtttgagatcagcctgtccaacacggtgaaaccccgtctccactaaaaacacacacaaaaaattagccgggtgtggtggcacacactgtaatcttagctactcaggtagttgaattgcttgaacataggaggcagatgttgcagtgagatgagatctcaccattgcactccagcctgggtgacagaccgagactccacctcaaaaaagaatgtatatatatatatatgtagagagagagagagagagagagagagagagagagaaaatttatgaaagtatgcacaacaaaattaaaatgttgactctaaagtgagctactgagtgactggggtgcatgagagaaaaggttacttaacatttttatacctattgaattgtatcctatgtatgcattataaatttaaatgtgcaataatgcagataactgaaatgtgggtatgctttgattaggactttgcatttcccatttgctcaaattccttatgattctagatgcatatgaatagaaatacaaaatgtaaggagacacgggacttctgatagccctttcttctttccacattttgtgtctctggctgtagtttgccatatgagtccatatggctaatgagcaaaatatttttcagatggatacatgtgaccaagcattgcaagttaaagatatttctgaatcttggacctcttatttacagtgaagccccctcatgcatagtaaagcagagaggaatgtaaaaggttgctgcatggataatcaatttctggtgagcaataattataggcaatgtaaaatgagacaattattgcttttcatcatatcttgaaagaactcttacagtccatgattttgaaaaaaaaatctaagttcactcttttcttttctataaaaaaagacattatccagtagaagttcaagagtaaaatctgaaggcagcttatctgacctagccacatggtcttgccacttgttaaatataactttctacacactaacttctccagacctcagatcttcaactctctaaaatggaaacctagtagtatttgcctctagaactgcagctgaactgagcattttagggaaggaacaaacatacacacgatatatatatatatagtcagattatgaacccagtgtagcccagaatgcaaaaatttctcagtaacagagatccccaagagaaaaatgtgatttagcctatctcagtggcctttcatgtggcaaatgaaaagttaaagtccataatgagaaatatatgggcagccagtgacaccatccattcaatgtagactctcaacatctctgacaatcattccctgttgtactccaacctgcttatatattggggtgatatcaccttttgatcataacatacataaacctcaagcttcagtaagaaatatttatgaacaatcagatattctgtgtttccagtcaaaactcaggtagatcacattttatgtgacaggagaaggcacagttgatgcccagttaactgtgagatcatctctgcctgcagcttcctatcatcatagcaagctctttccctgcagttcaccatctgtatctgccctttgctatatagatagcaaaaataagcatctaaaaagatgctcaacaccatatgtcactagggaattcaaattaaaacaatgatgagataccattacacatctattagactggctcacatccaaacactgagactaccaaatgctgatgaggatatggaacaacaggaactctcattgattgctgctgggaatgcaaaattgtaaagccactgtggaaggcagttttgcaaattccttcaaaactaaacatacgcttaccatatgatctggcaattgtattccttggtatatgctcaaatgacttgaaaacttatatccactcaaattctgtatatgaatgtttatagcagcttatacgtaaccaacaaagattggaagtaaccaggatatcgtacaataaggaaatggataaactaattgtgaaacattcatacaatggaatattcttcaggaataaaaataaatgtactaccaaggcatgacaagacatggaggaatcttaaacatgtatttctaagtgaaagaagccaatgcaaaaagccacatagtgtagagttccaattatatggaatactaaaaaagacaaaactaagcagatggcattatataaagttcagtggttgccagaggcttcagcagagggaaggatgaataggtggaacacagaagatttttagggcagtgaaacttttctgtgtgaccctataatggtggatatattgcttaagcatctgtcaaagcccataaatggtagaacacaaagagtgaatcttaatataagccatgaacttaataatatcaatgttggctcatcaagcataacaaatgtaccgcactaacaagatgataatagaggaagtgtgtgtactgtgttgtgaggcagatattagagctcaatatgccttctgctctatttttctgtacacctacaactgttctaaaaattaagtcaattatttatttgttaattattatttttaaatttatttttcgagatggagtctcactctgttgcccaagctggagtgcaacagcatgatcttggcttactgcaacctctgcctcccgggttcaagcgattctgctgcctcagcctcctgaatagctggaattacaggcacccaccaccatacccagctaattttttgtatttttagtagagacggggtttcaccgtgttagccaggatggtcttaatctgctgacctcttgatccacccaccttgccctcccaaagtgcttagattactggcatgagccattgcaccaggtcttatttatctttttgagacaggttttagctctgtcactcaggctggagtgcagtggtgcaatgatggctcaatgcagcaccaacctccagggctcaagtaaccctcccacctcagcttcctgagtagctgggaccacaagcgtgtgtcaccatacctgacacatttcttagacctcagaaaagatgctcaacaccataagtcactaggaatattcagtattcaaatagaggcttcaatgggctccgaactatcccctcctgaactctataaaaagcgtgtttccaaccggctgaatgaaaacaaaggtttacatctgtgagatgaattcacacatcagaaagcattttcaccaagaacttttctagttttatagcaagatgttcattttttcaatattggtctcaatgggctccaaaatgtccctttgtacagtctacaaaaatttttgccaaagtactgaatcaaaacaaatgtttaacactgtgagatgaattttcaagtcaccaaacatttttacagatagtttgtatctactttttaatcacaaaacttagaattgttcactataagcctcaaagggctctaaattgtcccccttagcttctactaaaagagagttttgaacctagtgtgtagaaacaaaagtttaagtctgtgaaataaatccccacattgcaaagctatttcacagatagcttgcttctagtttttatcatgaattattcaacttttcactacaggcctcaatgggctctgaaatgtcccttcatacattctacaaaaagagtgtttccaacttagctgaatcaaaaggaagtttaaactgtatgagatgaaaccgcaaattgcaaagcattttcacatatagcttctatagtttctatcatataatattcagtttttcactgtaggcctccatgggctatgaaatgtcccctcataggttctacagaaaggtgtttccaacatgctgaatgaaaacaaagatttaactttgtgagatgaacccacacatcacaaaacatttttatggatggattttctctagtttttattgcagaatatttgatttcatgctgtaggtctcaattttctccaaaatttccccttgtagattctacaaaaagaatatttccaatctgctgaatcaaaaccgatgttcaattctgtgagatgatatgcaaagctttttcacagatagcctgtttctagtttttattgtgggatatttggtttttcactataagcatcagtgggctctgaaattgtccctttgtagattctacaaaaagagggtttccaacctgttgaatcaaaataaagttttaactttgtaagatgaacccacacatcgcaaagcattttcacccatagcttgtttctaatttttaccatgggttattggtttttcactaaatgcctcagtggactaggaattgttgccttgtagattgtacaaccaaagagtttccaacctgctgaagcaaaacacaggtttaactttgtaagatgaatctacacattgcaaagcatttttacagataggttgctttgagtttttatcaagagatatttgatttttcacagtatgcttcaatgggttatgaaatctccccttgtagattctacaaaaaaagtttccaaactgatgaatcaaaagaaaagttcaacttgtgagatgaaatcacacattacaaagtattttcagaaatagcttctttatagtatttctcgcaggatattagattttccaatattagcctcaacgagctctgaaatgtccctttgtagattgtacaaaatgagtgtttccaacctatggaataaaaaggaaggtttaactctgtgagataaatccacacatcacaaagcatcttcacagatggcttgtttctaatttttattgtgggatattcggtttttcactaaaggcctcaagcactccgaaatgtccttttgtagattctataacaagagtgttttaaaactgctgaatcaaaacaaacgtgtaactctttgagaggaacccacacatcacaaagcatattttcagatcacttgtttctagtttttaaagcatgatattcggtttttcactatatgcctcatcagactcagaaatgtctcatagtagattttacaaaaacagtgtttcctacctgctgaatcaaaacaacagtttaaatctgtgagatgactccaaacctcgcaaagcattttcacagatagttttttcctagtttttttcgcaggatatttggtttttcagtataggcctcaatgaactctgaaatgtccattcataggttctataaaagtgtgttcccaactccctgtataatagcaaaggtttaactctgtgaaatgaatctatacattggaaaacattttcacaaatagcttgttcctagcttttatgatgagacatttgattttttactattggcctcaatgggttcagaaatgtctctttgcagattctacaaaaaaaaaagtttttcatttttctgaacaaaaataaaggtttaactctttgatatgaaatcagacatcacaaagaattttcacacatagcttgtttctagggttcatcactggatattgtgtttttcattataggcttcaaaggagtcttaattgtaacttcctaattctacaaaaagagtgtcccccaacctgctgtatgtaaataaaggtttacctctgtgagataaatcttcacattgcaaagcattttccccgatagcttgtttctagtttttatatcgggatattgatttttcactataggcttcaatgggctttgaaagattcctctgtagattgtacaaaaagagtgttttaacctgctgaatcaaaacaacgtttaactttttgagatacatccacacatcacaaagtattttcacggataggtttttattttattttattttattttttttagatggagtctcactcagtcacccaggctggagtgcagtggcacgatcttggcttcccgggttcatgccattctcctgcctcagcctcccaagtagctgagactacaggtgtctgccaccaggccaggctaattttttgtgtttttagtagagatggggtttcaccatgttagccaggatggtctcgatctcctgacctcgtgatccacccgcctcagcctttcaaagtgctgggactacaggcgtgagccaccatgcctggccaatagcttttttttacttttattgtggaatattggtttttcactacaggctgatattggcttcaaattgtaccctcacagattctacaaacagtgaattttcaagcttctgaagcaaaataaaggtttaaccttgtaagatgaatctgcacattattgctggatattcggtttttcaccgtaggcatcgattttctctgaaatgtcctattgaagattttgccaaaagagtgtttctaccctgctgaatcaaaagaatggtttaattctgtgagatgaaatcacccatcgtaaattattttcagagacatcttcatatagtttttacctcagaatattcggtttttcactataagcctcaatgggctttgaaatgtctcccataaattgtacaaaaaaaaaaaggaatttccaacctgttgaatcaaaacaaatatttaatgttgtgagataaattcaaatatcgcaaagcattttcacagattttttttctactttttatcacggaatatttggtttttcactatagtcctcagtgggctcagaaatgccccttgtagattctacaaaaagaatgtttctaacctgctgaaccaaaacaatactttaactctttgaggtgaatccacacattgcaaacattttcacagatagcttgtttttagttttgatcacgtaatattggatgttttacaataggcctcaacgggctcagaattgtcccctcttagattctactaaaagagtgtttccaaaatgctgtgtaaaaataaaggcttaacactgtgagatgaatcgacacatgacaaagcattttcacaagtagcttgtttttacttttcatcgggagatattcagtttttcaatatattcctccatgggctctgaaatgtcccttcatagattctatgaaaagactgtatccaactgattgaatcaagacaaagatataactctgtgcgagaaatccacacatcacaaagcattttcactgatagcttgtttctagtttttatcacgggataattggtttttgactataggcctcaatgggcttcaaaatgtcctttcatagattctacaaaaagagtgcttcagtcctgctcaatcaaagcaaaggtttaattctctgaaatgaatccacatatcacaaatcattttccaatatagcttgttgctagtttttgtagtgggatatttaattttttactttagacctcaatgggctctgaaatgtgccttcttagattctacaaagagtgtttctcacctgctaaatcaaaacaatggtttaactttatgagataagtccacacgtcacaaagcatttttacaaatagcttgtttctaatttttatcatgggatattcagttttttcagtgtaggcctcaatggtctgtgaaatgtcccctcgtagattctacaaatagagttgttgcaatctgataaatcaaacatttaattctgtgagataaatctataaatctacacatctcaaagcattttcccagatagcttgtttctggtttttatcatgggatatttggtttttcactatagacctcaataggctctgaaatgtcccctcatagagtctacaaaaagagtgatttcaacctgctgaataaaaacgaaggtttaactctgtgacataaaataacaaatcataaaatattttcacagttggcttgtttctagtttttatcatgcaatactcagtttttcatgacagggcacaatgggctccaaaatgtccctttgtacattctaaaaaaagagtgattttggtctgctgaataaaaacaaaggttttatactgtgaggaatccacacataggcaggaattttcacagatagcttgtttctagttttcatcgcaggatgttcggttttttaatatacttcttgatggactctgaaatatcccttcatagactctacaaagagagcatttacaacctgctgagtaaaaacaaaggtttaaccctgtgagatgaatccagacatctcaaagcattctcatatataacttgtttctagtttttatcttgagatataacgcttttaactttaggccttaatgttctctgaaatgtgccattttagtttctacaaaaagagtgtttcaaactgctgaattaaaacaaggtttaagtctgtgatatgaattgacacatcacaaagtattttcacagatagctttttactaggttttgtcatgggattttcagtttttcactaatggctttcatgtgctctgaaatgtccctatgtagattttacaaaaagggtgtttccagcctactgaatcaaaacaagggtttaagtctatgagatatatccatacattgcaaagcactttcgcagattgctagtttctagcttttatcatgagatacttagtttttcactatagacctcaataggctcccaaatggctctcatagattgtacaaaaagagggttttcaaagtgctgaatcaaaaaaagttttaactcagtgaggtgaatccacacattgcaaaatattttcacagatagcttgtttttgtttgtttgtttgtttgttttgtttttatcatgggatatttcatttttcactataggactcaatgggcaccaaaatgtcttctcctagatcctacaaactgactgtttccaacttgcttaatcaaaacaaaggtttaactctgtgatatgaatacacacatcccaaaggattttcacagatagcttgtttcttgtttatatctccacgtattttgtttttcactgtaggtttcaatgggctttgaaatgtttcttcgtagattgtgcaaaaagagtttttcaaatctgccaaagtaaaatagatgtttaactctttgagatgaatccacatactgcaaagcattttcacaggtagcttgtttctagtttttatcatgggatattcggtctttcactgtagtagtcctcaatggactctgaaatggcccttagtagattctagaaaaatagtgtttccaacctgctgaatcaatataaatgtttaactttgtgaaaggaatccacacaatgcaaagcattttcatagatagcttgtttgtagtttttattgcaggatattcagtgttttaatgtacttgtccatgggctctgaaatgtcccttcatatattctataaaaaaatagtgttttcaacctgctgaaaaaataacatacgtttaactctgagagatgattccccaaatcacaagaccttttcacagatagcttgtttctagttttcactgtgggatatttaacttttcactataggtctcaatgagctttgtaatgtccttttgtacaatctgcaaaaagagggtttccagcctgctgaatcaaagcaaaggtttaactctgtgagatagatccacacattgcaaaacattttcacagatatcttctttctacttttcatcataggatacaccctttttccaagtaattctccaggggctccgtattgtcttttcatagattccacaaaaagaatgtttccaaacagctaaatcaaaacaaaggtttaactctgtgagttaaatctacgcattgcaaagcattttcacagatagcctctttctcatttttatgaagggatattcagtttttcaccataggcctcaatgggcactaaaatgtcttctcatagattctaaaaacagactgctttcaacctgcttaatcaaaagaaagctttaactccatgatatgaatacacacattggaaagcattttcacagatagcttgtttgtagtttttttctccacatattttgcttttcactataggcttcactgggctttgaagtatttctttgtagattctgcaaaaagagtttttccagcctgcatatttgaaacaccagtttaactctgtggcatgaatccacaatggcaaagcattttcacagataggttttttcttgttttttttttttttatttctgtgggatatttcatctttcactgtagatctcaatgggctctgaaatggcccttcatggattctacataaagagtgtttccaacctgctgaatcaaaacaaatatttaactctggaagatgaatccacacatcacaaagcattttcagatatagacttttattgtttttattgtgaaatattctgctttttactataggcatcaatgggtgtgatatatcccttcatgtattctataaaatagtgttttcaacctgctgaatttaaacctgcaaaggtttaaatctgtgagatgcacccacacattgcaaagcattttcaaagacagtttgtttctacttttatcgtgagatattttgtatttcactatgggcctcagtgggcttcaaactgtccctttgtagattctacacaaagagtgtttccaatctgcttaatcaaaaaaatgattaactctgtgagatgaatccacacatcacaaagaatttttactgatagcttgtttctggatgttattgtgggataatcggttttttaatcaacctgctgaatcacaagaaagatttagctctgtgagatgaaatcacacattgcatataactttcagacacagcttttttgtagttttttatcacaggacattaagtttttcactacaggcttcagtgggctttgaaatgtccttgtgtcgattgtacaaagagagtgtatccaacctgctgaaagaaaacgatgtttaattctttgagatgaatccacacatcccaaagcatttttacagacaggttgtttccattttttatcatgagatattagggttttcactataggtttcaatgggctctgaaatgtttcttcgtagattctagaaaaggagtgtttcaattctgattgaattgagtgttctgattcttctgaatcagaagaaagttttaactctgtgagttggatccacacattgcaaaactttttcacagatagcttgcttctagtttctttaatgggatatttggttttccactataggcctcaatgggctctgaaatgtttttatgtagaatctacaaaaagagtgtttccaaactgctgaattaaaacaaaggtttaaatatgtgacattatttcacatatcacaaagtattttcacagataacttgtttgtagtttttatcgcgggatattcagtttctcactataggcctcagggtttgaaatgtctttccttagatttatgaaaaacgtatttctagcctgctgagtgataacaaatgtttaactctgtgagatgaatccagacactgccagtcgttttcacagatagctgttttctagttttgtgtgtgtgggatattcgcttttttacaatatgcttccaaggtctcagaaattcccattcgtagattctacaaaaagagtgtttccaaattgctgaattaaaacagaggtttaactctgtgagatgaatccaaacattgcaaagcatttggacagatatcttctttctcgttttaatcgcaggataattgatttttcattatgggcctcaaaggtctttgaaaatgctcttcatagattctacaataaaagtgttttcaacttgttgaatcaaaggtttaactctaggagatgaatcaacacatcacaaactattttcactgataggttatttctagtttctatcgcaggatattcagtttttcactatatgcctcaaagggctctgaaatgtcccttcatagattctacaaaaagagtgtttccaacatgctaattaaaaaaaaagcttaactctgtaagaagaatccacacatcacaaaacactttcactgatagcttgtttttagtttacttcgtggaattttttttttttttttttttttttactataggccccaatgagctctgacattttttctttttagattcaacaaaaatagtgtttccaacctatggaatcaaaagaaaggtttaaatttgtaagacgaatccacacatcacaaagcattttcacagacagcaagcttctaggttttttccgcaggatattctgtttttcactgtaggcctcaatgggctgtgacatgtttattggtagatactacaaaaagactgttttcagcctgctgaatcaaaagaaaggtataactctttgagatgaacccacacatcctaaagcattttcacacatagcttacttatagtttttatcgtgagatattctgtttttcactatagacctccatgggctccgaaatgtccccttgtagattccagaaaaagagtttttccaaagtgctgaattaaaacaaaggtttaactgtgtgacattattttacagatcacaaagcattttcacggatagcttgtttctagtttttgttgcaggatatttggttttaaactccaggcctcaatgtgcttcaaaatgtctcaccttagattctacaaaaaacttgtttccaacgtgctgaatcaaaacaaaaagctggctctgtgagataattccatgcctcgcaaaggcttttgacagatagcttgcatcaagttttcatcgcgggatattccatttttctctataggcatcagtgggctctaaaatgtccctttgtagattctacagtgaaagtgtttctaaactgctgaattaaaacaaagatttagctctgtgagataaatccagacatcacaaaacatttcactgatagtttgtttctagtttttatcgcaggatagtcagtttcttactataggcctcaatttgctctgtaatagcccctcttagattccagaaaaggagagtttccagcctactgaatcacaagaaatgtttaactctgtgagataaaatcacacattggaaagcattttcagacatagcttctttgtagtttttatcgcgggatatttggtgtttcactataggcctcaatggattttgaaattttccctcatagggacacaaaaaaaagggtctatccttctgaatcaaaacaaagttttaactgtgaaaagaaagccacacatagcaaaggatttttaccatatctgccaacaaggaaactcttgttctcccacttttatcagagggctgcctgatttctataggatgagaagcaggcagcagtgtctggatgtgcctgctcatgtaggctctgttacaatcatctgcatgttcttcttcatgtggaggggatcttttatggatctgttgctaggggggactgcctctctctacagatcttttggctgccagggatttcagggagcaaaaaatacttccagtaggctggctgcactccaggttgtgagtagtggtctcactatgggggattggggtgtttgcaggaggcttttgggtcctctggcaggaatccttgaacatggcttggactctagcacaggccctctcattctccaaggcaagcattgattttccattgctttcatgaggagtccatactactcttcatcagcgctcctaaacacacttttttggcttgcaattacctcagacggccactgagacactctctgaactgcatctgcacccatgaggtcagttcgaagtgtgagacttctgcttcaccttgaacttgcctttctcatgtttcctgcctttcccagagagccatgttgagtagcaggagcccctgtgaggcccaggatgaagggaggcagtgagctcaagggccctgccattttctgctgacatctgcctctggggtcttgggtatgatttcatcacctggacaccccttaacatctcagcagactgtattcccttccccatgggacccaattcttgcacacagcctctttcgggaatggaataagaggaacagtttccagcatccacatcacagtctccaagtgcctcctcctccagcaggacctgaccatgtagatggcccgaaggggcctgcttagagggtgtgggggtgagtcttcttaaaatttgccccccttggtgatgtctaggtacagcccgcctgtgttccccaggctgctctctcccaagaagagcttgctgcagaaacacacagcctctgaagctgctgggatgtgtgtttctgtgggagtgtttcaagttgtggatatctgcgtgtgaatgtggtcatgtgagtgtgtgtgtgtgtgtatgtctgtgtgtgggggtaagtggagtctgctaaaagaaatgtggctaacgcactgcagcactgttttttgtcaccccaccttctggtggcctgtctctgtggctctgcttgggctgagggtctccatgttcttcatttttccatggttcctgaatccacagtgaattggaagaatggctgacaaccgctggggtcaaaatcacctccctttgcaaaaacgccacatttctacaaagaagagaagcacaccacaccccaaaacagacaacttcccgtgctttattgttctgtgaccaacgcagggccagaccccagcagtccagtcgcagggcttcttgaatttacctctattttggtttgtagctgagcaggtgcttcaggtcatcagggaggcactcctccattgtctcagaatcttattctgggacacagagtgtgagcaacaataaggtcagataggggtgaggatacaatctgttgaggtgtggatgggatctcacaccttcacctgcaaaaaaggtgcagaaagatgacacagaagttgcttccaactgcatcccctcattcccttcattgcacagtcaacagcatggcctggtgcccaggtgggatgactcaatcgtgcagggaaaagtaggattacaaactggggcccttctggccagctccagaattgagctttcattcccagagccacattggagtgagatggattgatgctgggttggatgtggcctccacactggcctcctctgttcctgacttccatgttccttgtgggcctagagtgtcctaggtctggctcagtctgacttccatgttcctcatgaacctggggtttttctggatctggctcaaagtcttccacactaaaagtttcccagttcatggaggacgactctcatgggaatccattgcatgagtgttttcttataaacactgtcacattttaatgactgggcagttgtgatacttttggaatcataaatttcgattatatccaccatcaagataactcttgttctcccacttctaaaggacagctgcatgactcctgtaggatgagaaacaggcagctgtgtctggcttttacctggcaatctaggctctgtttcatgtcatctgcacttcctttctcattgtggatggggtttttcattgggctgttggtggataggactgactttcattgtggatattttcgttgccaggaatatcagaaagcaaaaggcattttgggtaggctggccacacaccaggtggtgggtagtggtctcatagtggtggctggcattgtttgcactttgcaggaggcttttaagtcctctggcaggaatccttgaacatggcttggactcctgcacaagtctgctcattctcccaggagagccttgatttttctttgctttcatggtttgtccacattgccaatcaacagcactcctggacattattctcaggtttcaaattgccccagacagcctctgagacactctctcaacctcatgtgcgcccacgagaggcctgttttaggtgtgagaacactgctccaccttggacttgcctttgtcgtggtttctgcctttcccagagagctgtgctgagaagcaggagcccctgtgaggcctgggatgaaggaaggcagggggttcaagggcctggccatcttccactgacacctgccacttggatctcagatattattccatcacccagagacctcttaacaactcaccagactttattcccatccccaggagacccaattcatgcacacagcctcttttgggaatggagtcagaagaccagtctccagagctcacctcacagtcttcaaactcctccttctcctgtgggaccctaccatggagatgtctcatgaaggccctatgttcgagactattagcgtgctgcagtgggttgcttcaggcagcctttttctggagactaggccagctctggctgtaccattttcctgagctttgccaggcttacagccctgacagccaggtgcccgagcctgcttggtgaatgcacatgtgaccgtcaggccaccaggcaccagtggtgagcagtggctcatgtcacagtgaatgccaccattacctggtgacaagtcccttcatcttggtggagaaggagtcctctgtggatgtgtgttggcattgaactatcacctgtctactctgagggctctatgggatattcccacaatcctaggagtgggcagtggcgagtcagcctgaagacacatcaagtggagccccaggaataaaccacaaaatccctaaggatccaaaaggatacccacgatgagtcaggcctgcctagacagtgtgggagtgagtctttttgaaacttccctccctgtgatttctaggtacatcccgcctctgttttctgaggctgctctctctcagaaggagctttctgcagaaccgtgcagcctcaggagctgccaggctgtgtgtttctgtgcgagtgttgtgagtgtttgaatgtctgcgtgtgtgtgtgtggctgtatgtgagtgtgtttgtgtgtgtctgtgtgtgtgtgtgaggggcatctgctaaaaggaatgtgtttaatgcactgcagcacttttttttctagtccctccaccttctggtgcacctgtctgtgtggctctgcttggcctatggggctgcatgttctttgtttttccgtggttcctgagtccacggtgagttggggggatggttgagactcacaggtgtacaaatcacctccccatacaaaggagccattcttctagaaagaagaggagcacaccactctcagaagaagacacctgtcagggcctcattgtcctgtggtcaacccagggtgtgactctagcagtcctgtccacaggccgcttgaatccaattcgaattctgtttgcagccgagcaggtgcttcatgtcatgaagggagcactcctccaacatcttgggatttcattctagaactaggagtgtgagcagcaataagttcagatatgggtgagcatacagtctgctgaggtgtggatggggtctgcaccttcatctgcaaaaaaaggtgcagacagatgacacacgaagtgcttccaactccacccttgcattcccttcattgcacaagctgtccacaacatggccccatggtcaggtgggaggactccaacttgcggggaataaaaaaaaggtttaactgatacaaaaaggtttatctctgtaagataaatccacacatcgcaaataatttgcaaagatagcttctttctagtttttatgccaggatattaggtttttcagtatagtccacaataggctctgaaatgtcccttcatagattctacaaaaaagtgttttcatcctgttgaatcaaaacaaaggtttaactctgtgagataaatccacacttcacaaagcattttcacagatagacagtttttagtttttactgtgaaatatttggtgttttactttagtcctcaatgttcacgaaaatatcttttttttttgtatatgctacataaagagtgttctcaacctaccgaatgataataaaggttaaactttgtgagatgaatccacacatcacaaagcattttcactaatagattgttgctagtatgtatcgtggcatattcagtttttcaatatacttgtcagtgggctccaaaatgtccttttgtagattctttaaaaagagtgtttccaacgtgctgaatcaatataaaggtttacctctgtgagaagaatccacccaccaccaacattttcaaatattgcttgtttctaatttttatcttgaaatattcattttttcactataggcctcagtgagctacaaaatgtcccttcataggttgtacaaaaagagtgttgccaacctgctgaatcaaaacaaaggtttaagtttgtgagacaaatccacatatcagaaagcattttcacaggtagcttgctgctagttttaatcactggtattaggtttttcagtatagcctctaatgtactttgaaacatccctttgtagattctattaaaagaaggttttcaacctgctgaatcaaaacaaaggtttaactctgtaagatgaacccacacatggcaaagcatgtacacagatagcttgtttctagtttctattgcagaatatttggttttccacagtaggcctcaatgggctctgaaatatccctttatagattctacaaagagtttttccaacctgctgaatcaaaaaaagttttatctctgatagatgaattcacacatcataaaacattttcacagacattttgtttctagattttatcacaggatattaggtttttctctataggcctcaatgggctccaaaatgtttcttcctagattctacaaaaagagtgtttccaacctgctgaatcaaaataaaggtttatctctgtcagacgaatgaacacatcacaaagcattttcacagataacttgtttcaagtttttatgataagatattttgttttccactgcaggcctcaattggcttcaaaatattcctttgaatgttcttcaaaaagattgttttctacttgctgtaacaaaacaaaggtttaactttgtgagataaatccacacattggaaagtattttcacagatagcttgtttcctgtttttatagcagaatatttagttttacaactataggcctctatgggctgtgaaatgttgctttatagattctaagaaagagtttttccaacctgctgaatcaaaacaattttaactctcagttgaatccacacaacacaaaggattttcactgatagatttttctagtttttatcaaggaatatttgtttttttattatagttctcaatgggccctgaaatgtcttttaacacattccagaattagactgtctgcaacctgcagaataaaaacaaaggtttaactctgggagatgcatccatacatcacaaagcattttcacagatagcttatctctagttttcattgtgggacattcgattttttaaaagaggcctcaatgggctttaaatgtcccttcgtagattctccataaatagtgcttctaatctgctaaatcaaaacaaagctttaaccttgggagatgaatccactcattgcaaagcattttcacataaaactttttctagttttcatcatgggacatttgtatttttactacaggcctcaatgggttccaaagtgtctcttcataggttctacaaaaaaaagtgtttccaacctgccttctatagattttccagaaacagtgttttcaacctcctgaatcaaaacaaagatttaactgtgtgtgatgaatccagacatcagaaagctttttcacagatagctttttctagtttttatcatgggatatttgtttttcactacctgccaaaatgggctccaaattgacctctcacagattctacaagcagagagtttccaacctgctgatgcaatacaaaggtttaactttgtatgataaatctacacatcacaaagcatttttacagataccttttttctagcttttatcacagtataatctgtttttcactacaggcctcaatttgctctgaaatgtcctgtcgtatattctacaataagaatgtttccaacctgctgaataaaaagaaagatttaactctatgagatgaaatcacacatctcaaagcattttcagagatagcttctttatagtttttattaggattttaggtttttcactataagcctcaatcaatgggctttgaaatatctcatcaattgtacaaaaagagagtttccaacctgctgaatcaaaacaaaggtttaacattgtgagacaaatccacaaattgcaaagcatttttacagataacttgtttctagtttttatcatgggatatttggtttttcactataggcctcagggggctaagaacagtcccccctttgattctacaaaatgaatgtttccaacctgcaaagtttccaacctgctgaatcaaaactaacattcaactctgttagatgaatccacacgttgcaaagcattttcacagatagctagtatctagttttcatcgtgggatattcagttttttactacagacctcattgggtttgaaatgaccccttgcagattctagaaaaatagtgtttccaacctgctaagtcaaaataaaggttaaactctgtgagatgaaaccacacattgcaaaacatttttacagatagcttgttctagtttttatcatggcatatgtggtttttcactattgacctcaatgagctccaaaatgtcccttcctttattctacaaaaagaatgtttccaacctgcccaatcaaaacaaggtttaactctgtgagatgattctaaacattgcaaaacattttcacacatagcttgtttctagtttttatcctgggatatttggtttttggtataggcctctatgggctccaaaatttcccttcatagatattacaaaaagagtgttttcaaccttctgaaccaaaacaagggtttaactctgcgagatgaatccacacatctcaaagcattttcacagataatttgttgtcagtttttatcagggatattcgtttttttataataggcctcaaggactcagaaatttcttattttagattctactaaaagaatgtttccaacctgctgtatataaacataggtataactctatgagataaattcacacataacaaacattttcacagatagctcatttctagcttttatcacaagatattcaggtttcactataggcctcagtgggctctgaaatgttcctttgtagattctacaaaagaatgtttgaaacctgcagaataaaaacaaaagtttaactctgtgagatgaatccacacaacacagagcattttcactaataatttgttgatagtttctatggtgggatatttagtttatcaatacactcatccatgggcttcaaaatatcccttcattgatccttgaaaaagagtgtttccaaaatgctaagtcaaaacaaatgtttaactctgagggataacccacacatcacaaggcattttcacagatagtcactgggaagctggcctttctggaaaagccacctttttggcacccctcccctcatgcccgtgacagtggcacagtgctgtatcctgcctgggctttggcctctgctttgtccctcctcttgccctgtctcccctgcttctgaggggcctacatgcctcttgctctggctgaatgtcttcaacaatgatcacatcccaggccgtcagggagacacttcctggagatccctgtcgtgattgtttctctctttcaacctgtttctgcttgatagggcaggattgacgaccctggagctcttggcttccacacttgtctcagacagggaagcttccttcctctccgtgtttcacctcatgggtgggtggattgcctggaatgagcactaggcgaccgtgacaggccttgtcttctaggacaggtggtgtcccatttcctctgcacttcatgtctcatttgtgagagacatcctctcctctgctcctgggtggactgactccctggatcttttgatggtaaagaatatcggggaaaggaaccaaagggactgggctggggctggagctgggtctggatctggggctggggctggttgcaggggaggttgggtcagggctacctgggccgtggagggttgggggtggggtgaattttgcagaaacctctttaatcctctggcaggcatttcaaaatgtggcttggactcaggcacaggccccctcctggttcccagttgttctttgattttccttggcatcgatggaaaggtcacttgatccctccttccaccggacacatgcctggacaccattgttggttttgccatcgccccatatgcctccggtgacacacattcacaccatctgctctgggatacgccagtgccacgcttggtcgcattggcctcacctcggaatcgcctctgtctttgtttgcacgtgtcctgaaaagcagtgtcagcttggaggagactcagggcttttagaagcggggcaggccactgctctttcaaagggggagggaggcagagggctcagggatcagtgaattttcagctgacaccacgcgttgaggcccatgtgatcattctgtgctgcagggaggccctgcctgcctcaccagatgtggtgaacccatcctttctcacccagaggggtccaaaatcggatctgaaggggagttctgagaacctagcaggcaccctgaagctccccgtccatcggtggaagtcggctcaaggaggtcctgaagactggactcctgggggtttggccctgggccaggacatctgcggccccctctcccacgcggccccaaacgggaccccagatccagcctctgccaaggctgcaggaggagcccccctgctgctgcgcagccacggccttatttaaaggggacgcagccccactgccaggagcagagcgttagtcggcccaaccaatgcgcatgcgcgaggcgtgagcggattctcccatcacagtggttcccacggttgtcttagaaaccagtctccgaggcttggcaaagcagttctccttggcagtgcttgggtgtcgggactccgaggttccggcctgaccgctccacggggtcgacaggaacgtctccagatgccaggagtcgcaaagagccgaccacgacgatgagaccacgggcggagtccaggggaagcagcaaggcatcccagcctcaggcctgcccggacggtgttcgggtgagtctccccaaaagtcgtgcccccgggatctcaaggacaggtcggcttgcgtgcccctgggctgctctctcacccgagggtcgttctcatccagagcagaaccccgcagcctcaggtgttgcctgggggtgtgtgtttctgtgccactgctgtatgactctgtgtgtgtgtgtgtgtgtgtgtgtctcccattctctcttctgtctctgtctctcactctctgtgtgtttctttccctctctctgtccatttgtgtgtgtgtgcccgtgtgcgagtgtgtctttggacgaatgtgccctgtgcgccaaaaagcgatttctcgcatgtcagcctttctttggtgagcctctttctgtgtctctgcctgggtcctgtggctggctgtcaatcgttttcaccctggtaccactttggctgtgtgaaggcttcgaccgcgtgaggagatgcgttggtcccggagcaattgaaatctcatcctcatcctgagcggcctcatttttaggatcaagatgaccacactgcagccaaggacgaaagccccacaggagctcattgttttgcaggagaggagtggacccacgtcagaaatgaggttgtatcttttcccgggtcttctgtgagcaatgaagccacatcacgatagagtcttgaagaggaatccggaaatgggagttggcaatccctgtcactggaacgctggcctctctggacaagccacacttctggcccccctcctcttatgctcgtggaggtggcacggtgctgtatcctgcctgagctctggcctctgccctgccttccctcttgctctgtctcccctgtttctcagccgcctagatgcctcttgctctggctgaatgtcttcaacaaagatcatttccctgtccgtcagggagacacttcctggagatccgtgtcatgattgtgtctctctccaaacctgtttctgcttgattgggcaggtttgatgtccctggagctcttggcttccatgcgtgtctcagacagggaagctaccttggtctccatgtttcacctcatgtgtaggtggattgcctagaagcaacggtaagcgaccgtgaccggccttgtcttctaggacaggcgtggtgaaacatgtcctctgcatctcctgtctcattcttgagggacatcctctcctctgctcctgggtggacggactccctgaatcttttggccgcgtcttagatctgaggtgttctttgattttggttggcattgatggaaaggtcacttgtgctccccttcagccgggcacatgcctggacaccattgcttgttttgccattgccccatatgccctcagtgacacacatccataccatctgctctggtatacgccagtgccacacgtggtcgccttggctccacctgggaatcgcctctgtccctgtttgcacttgtcctggaaagcggtatcagcttgcaggagccccagggcttttaaaagtggggcgggccactgctctttcaatggaggagggaggcagacagctcatgggtcagtgaaatttcagctgacaccatgatttgaggcccatgggaacattctgtgttgcagtgaggccctgcctgccttagcagatgtggtgatcccctcctttctcacccggaggggtccaagatgtgattcaaagaggagtcctgagaccccagcaggcgccctcgagctctccctccatcggtggaagttggctcaagcagggcctgaagacaggactcctgaggtcacccgcggacctctctcccacgccgccctctactgggtcctggatccagctgccgcggaggctgcagcaggagtccccctgccaccgcgcagctgccattgtttcaaggggactccgcctgactgccaggagcggagggcgagtcggcctagccaatgcgcatgcgcgaggcgcgaggcgcgagccgcttctcccatcacagtgattcccacggttgtcttagaaaccagtccaggaggcttggcaaagcaggagccctccgtggcagtacttgggcgtcgggactccgaggctctggcctgacctctccacggggtcgacaggaacgtctctggatgccaagagtcacaaagggcctaccaggacgaagaaaccccctggcggagtccgtgggaagcaccgcggcagcctagcctcaggcctgcccagacggtgttcaggtgagtctccccaaaagtcgtgcccccgtgatctctaggacaggcctgcctgtgtgctcttgggctgctctgtcacccaagggtcgttctcatcgagagcagaagcctccagcctcaggggtggcattcggtctgaggagggtgtgtttccatgccactgccatgtgacggtgtgtgtgtgtgtgtgtatgtgtgtgtgtctcccattctctcctctctcgctgtctctcactctgtttctttccctctctctgtcggtttgtgtgtgtgtgtgtgtgtttgtgtgtgcatgctctggtgtgtgtgtgtgtttggacgtatgtgcctgtgagccagaaagtgatttcttgcatgtcggctggtctttggtgagcctctttctgcatctctgcctggttcatgtggccagctgtcagtcattttcctggccgttccactttgggtttgtgaaggcctcgatcacgtgaggagacgcgtcggtcccggagcaattgaactatcatccccatcctgagtggcctcttttctagggtcaagatgaccacactccacccgaggacaaaagccccacaggagctcactgtcctgcaggagaggagcagacacacgtccaagaagatgattgcatcttttcatggctcttctctgagaaatgaagccacaccatgatacagtcttgaagaggaagccgggaatgggagatggcaacaatccctgtcacgggaacgctggcctctctggacaagtcactggttaggcccccctccccttgtgcccatgggggtggcaaagtgctgtatcctacctgagctctggcccctgctctgtcctccctcttgctctgtctcccctgtttctgtggtgcctagatgcatctaggtctagctgaatgtcttcaacaaagatcactttccagtccatcagggagacacttgatggacatgcgcatcactattttttctctctgccaatctgtttctgcttaattgggctggttggatgaccctggagagattgacttccatagctgtctcagataagcaagctaccttggtctccatgttccacctcatcggttggtggattgcctagaatgagcggtaggccactgtgaccagcctagtcttctaagacaggcagtgtcacatttcatctgcacttccagtctcattattgagaaacattctctcctctgctcctgggtggactgactccctgaatcttttggcctcctcctggatccaggtgttctttgattttccttggcattgatggaaaggtcacttgtgccccccttccacctggcacatgcctgaacaccatcttgtgtttcaccatcaccccatatgccttcagtgacacacattcacaccatctgctctgggatacgccagtgccacgcatgttggaattgactccacttcggaatcgcccttgtccctgtttgcatgtgtcctgaaaagaggtgtcagcttgcaagggccccagagcttttacaagtgggacaggcgactgctctttcaaaggaggagggaggcagagggctcatgggttagtgatttttctgctgacaccacaccttgaggcccatgtgatcattgtgccctgcaaggaggcccttcttttctcagcagatgtggtgagcccatccgtcttcacccggaggggtccaaaatcggatcttaagaggggtcttcagatgccagcaggtgccctgaagctctccctccaccggtggaagtcagcttaaggaagtctttgagacaggactcctcgggatttggccctgggacccccgtggccctctctcccctgccgccccctactggaacctgcatcccgccatcgccgcggctgcagcaggattccccctgccactgtgcagtcgccattgtttaaagaggccacagcctgccttccaggagcgcaacgcgagtcggcccagcaaatgcgtatccgcgaggctctagctgattctcccatcacattgatttccatggttgtcttagaatccagtccctgaggcttggcaaagcaggagttctctgtggccctgcttcgttattggggccctgagcctccagcctgactcgcaagggttttaatacccttcccatcctcagctgcctctttgctaggatcaagatgaccacaacccagccaaggacaaaggcctcacaggtgctcattgtccacccccaggagggtgcccacagaccttcaagaaggcggttttcactcctctcgcactttgccctcattcagaaatccaggaagagttcgacacagcgacggagaaggaagccggcaacgggatgcggcaatcatttctgtcacccaaaagctggccttcctggccaagtcacccgcttgacactttttcccagttgctcgtgatggtggcattgtgccgtatcctgcctgggtgctggcctctactctgtcctccctcttgctctgtctgctcaggttccaggaatcctagaggcttcttagtctggctcaacgtcttcaacaaagaacacttcgcagtccatcagggagaaatatctttggggtccgtttcatgattgcttccctctccaaacctatttctggatgatagggcaggtgtgatgatcctggagctctgggcttccatacctgtcttggatagtgaagctcccttgctctccatgtccaaagtgatggctgcatagtcggtccaggaagagcgggaggcgacccgacagtggctgacctttgttttctaggaaaggtgatgttgcatcccacctgtatttcctctctcattcctgagggccatcctgttgctctgctcctggggagagtgccttcaagcactgaatcttttggctgccacggatgtcagggagccgaggggactgggttttgctgggtgcaggggagttggcatcagaggtacctacctgctggcaggattggggtgggatgtactttgtcgaaacctctgggctcctctggcaaccatccctgaatgtggcttggactcgggcacaggccctgtctcgcaggtttttaggtgtgcttggcttttcatcagctttgtgtgggaggtcccagtggcccacggacgcacaactggacgtcactgtctgtctcggcgtcgccccatatggcctcagagacacacgctcattccatctgctcttgggtgacatcagtgtcatgtgtggtcacattggctccatctcggactcgcctctgtctctctttgcatatgtcgcagaaagcagtttcgggatgccagagccctgggccttggagataaagacaggccactgctccacctaggaaggaggcaggcagcgggctcatgggtcagtgcattttcagcctacagtatgccttacggcccttgagatctttctgtgccccagcgagaaccttcccgcctcactacattgtaaccccattcctgatcaccggttcggatccataatcagattcgaggaggagtccggagagcccagcggcaccctgaagctcctcctccaccaggaactgaagcagaagatggatcaagaaggtcctgacgacaggacccctatgggtccaaccctgggtctcctgcaggccccctcctagtacccttcccacttgccgcctcggactgtaccgccaccccagtcgccgcagtcagctgtgttgcagccattttttaaagggtccgcagcctgactctccggagcaagggcggagtcggcctctccagtgagcatgctcgacgactgagccaccactttggtaacagtgtccgccactgttgcccagaaataggtccctgagacttggcaaagtaggagccatgtgtgatagtgcgtcagagtcgaggctgagagcagtcctggccagggtgttaacaggatggtctccggagaccggtattttcggagggtggacaaccaggaagaaacctcaggagcaagaaacctcaggcagatcgcaagggaggcagcgcgagatgccagcctcaagccaggatttgcggagggtcgatgaggcccctctcccaatcttcacttcaccagccaccaccccagtccctgcagccgccgctctgccgtcatttattttattattattttttaatagtcggagtctcactctgtcacccagtctggagtgcagtggtgggatctcagctcactgcaaactctgccgcctgggttcaaatgattctcttgcctcggcctcgcgagtacctgggattagagggattaatcagagtcgaggctaaaaccagtcctggccagggcatcaacaggatggtctctggaggccggaattcacggagggtcatccaagaggaagaaaccgcgggcagagggccgaagaagcagggcggggtcccagcctcaggcctgcatggaccgtgtgccagtgagtcttttcaaaaaaggagagttttgcttgtgtgtccatgagctgctctctcactgatgggtcgtagttgcggagagcagaacacggcagcttcaggggctgcctgggggtgagtgttaccgtgccactgccctatgtctttttgcgtttgtgtgtgtgcgtaagtctctctcttatttctctctctcctttctcggtctttcgctctgtgaccgtctgtgtgtgcgtgtgtgtgttgggacacatgtgccctgtgtgccagagggcggtatcttgtacgtcagcctttcttctggtcaccctctccccgcgtctctccctgggtcttgtggccggttgtcagtcgtttttccggtggttccagtttgagtttgtgaaggtctggatgagatggggagctgcgtctatctcataaggatttaaatcacctccccaccctgagagacctgttttctaggattaaggcctccacccccgagccaaggataaaagcctcaccggagagctcattgtctacctgcaggagctgtgtagagcgacatcagaaaagattgttctcatttgtctctctctttcatctccttaagaaatctagccacagggtaacacaggttttgagaggatcagaacaggacgtggcaaggatctgtgagtgtgcaggctgtgtttcacatatcattaaacatagtccagtgagggttctgcagatagctggcatttaggtttgttttattgaatcaaggaaaagaaaaaatgccgagtaaaaatgacacaacttgcctaccagcccatctgagtgttacaaatttaatagtaattttaatttatcttctcatgtaaaggtccttggcagtgatacctaatttcctaagatagccttgctttatattgtttgattaagatgtcatgcatatcagagaatctgaaaattcttcccaatgccgtcgacatacgtgattaatcacattaccaaaataacataccaaaacaaacaacagaaaattatttgttacttagttccttcaaatttgtttatctaattggtggttccttcatgcacaaaacgtttcatgtgtgtctggcactcttctggtcacaaatttcatcttaagtaacctaagtattgaaatgcttgtgctctttgattgatttttcctacataaatactttgataaaaagctacattgaggctgggcttagtggctcacacctccaatcccagctctttgggagcctgaggccagtggatcaggagatcaggagatcaaaaccatcctggccaacatggtgaaacctcatctcttcaaaaatacaaagaattagccaggagaggccaggtgctggatcatgcctgtaaccccacactttgggaggctgaggttggcagatcacctaaggtcaggaatttgagaccagtctgcccaacatggcaaaaccctgtttctactaaaaatacaaaaaattagccaggtgtggtggcaggcgcctgtaatcccagctacccaggaagctgaggcaggagaatcgcttgaacccaggatgcagaggttgcagtgagctgagatcatgccactgcactccagcctgggtgacaagagtgaaactctgtctcaaaaacaacaacaaaaaaaaaaaaaagaaagaaagaaaagaaaccttgtctatactaaaattacaaaaattagatcctgaaggtcacatctgaatgagaaagacattgtttgcctcaaattgtctgactccaaggaatagtgcagactggacaagtgaggtgactcacacctataatcctagcactttgggaggctgaggctggtggatctcctgatgttaggagctcaagaccagcctagccaaaatggcaacactctgtttctactaaaagaacaaaaattagccaggcgtggtggtgcacatctgtaatcccagcttctcaggaggctgaggcaggataatcacttgaacctggaaggcagaggttgtagtgagcttagattgcaccactgcactccagcctgggtgacagagtgagactccatctcagaaaaaaaaaaaaaagtatgtaagtcactaatatatcaaagaaaacaaccattcatgtattgtaaataaatactcaaccaagacaaaaagacatgtcacatgttatgggaaaagactgtaatgatggtgagagaaaaactgtgacccttgaatataagacagaaaaaaatcagggcacgatgttaaggaattggaaataattctctatattaaaggaatacaagaaacagaaagagaggagagagagacacgatagtcacacactgcaggggtttggggtagatgggaatcaaggaggcagagagagcagtgggaatgtacataaaatcaccctccagagctgtgctgtccaacaaggctgctgaacacttgaaagatggctagtccaacctgagaaatgctgtaagtggaaaacacatttaaaaaaatttctgaatactcagtataaaagaaagaatgggccggtgtggtggctcacacctgtaatcccagcattttggaaggccaaggcaggaggattgcttgagccaggagtttgagaccagtctgggcaacacagcaagagctcatctcttcagaaaaaaaaaaaattaggccaagtgcagtggctcacacctgtaatcccagcactttgggaggccaaggtaggtggatcacttgagctctggagtttgagaccagcctggacaacatgctgaaaccctgtcttaacaggtttttttgtattttaaaaatacaaaaattagtcaggcgtggtggcacatgtttgtggtcacagctacttgggcggctgaagtgggagtatcatttgagccctggaggtcgaggctgcagtgagccgacattgtgccactgcactccagcctggataacagagtgagaccctgtcttaaaaaaaaaaattagctgggcatggtggtggtcaggaacagcctgaccaacatggaagagcactgtttctactaaaaatacagaagtagccaggtgtggtggcacatacctgtaatcccaactcctcaggaggctgaggcaggataatcatttgaaccaggatggcagaggttgcagtgagctgagatcgcaccactgccctccagcctggcaacacagccagactctgtctcaaaaaaaaaaaaaaaaatacacacacacacacacacacacacacacacacacacacacaattttggagcgaagtttcaaaataaatcagtaagcaccacccaccaggtttatctttatgcaaagtgccccctctgcacatgcaggattaaatgaaccttgaaaatattatgctaagtggaagaagccagtcatgaaatatcacgttatgtaattccatttaaataaaatgtccaaaatacatgaatgcatagagacagaaagtagattagtggtggctcaaggttaggggagttgggggaaatggagggatatggggtttactttggggtaatgaaaatgatctaaaatttattgtgatgatgtttgcacaactgtgcaaatatactgaaatcattgaattttacactttaaatgggtggcttctgtgatatgttaatatttcttaataaaacttcagagaaaaagagtacctgtgtgcctccagagtccacatttttacacttgatgatgaaatcaagatattgtttcttcttcttctttatttttattttatttattttatgttttgagacagtctccttctgttgcccaggctggagtgcagtggcacgatttcagctcactgcaacctcccagctaatttttgtattcccagtagggattgtggttcaccgtgttggctaggctggtctcgaacttctgacctcaaatgagtccaccatcttggcctcccaaagtgctgggattgcaggcatgagccaccacacctggctcaagacttagttcccattgtttcagatgccctaggaccattttattctactttaatttctgatgcatcgtctcagtggaaattttacattacttcccaaagtattttactctttttaagatcttatcagctgagtgcagtggctcacacctctaactgcaacattttgggaggccaaggttggaggatcagttgagcccaggaattcaagtccaatctctgcaacatagtgagaagcccatctctacaaaaaaaaaaaaaaaatgtttaattaggtgggtatattgttgcatgcctgtggtctcagccagtaggtaggctgaggtgggaggatcactggagcccaggaggttgaggctgcagtggccatgattataccactgcattccagcaaaaatatttttaattacattttttaagaaaacaaaatatacacttactgacttgatacaaatgaatgacttttataatctacagaaaccaaaaaaataacaataataaaaacccacagccattcttcttatgtgagactctggtgtctctgagttgtaagaattgtgaattatgattaataacaaatatgcatgacaaggacccaataagagataggcattgataaattgcaaatcacacttactggagtaaggtctttaaagttgtacaagaaaaagaaagaaaaagaaaaggcattgaaaaactgcattggctaccaaaatgctaaagtttacctaagtccattaatcagcacacacacacacacacgcaatggatgtgtaaaatggtcaacatggtattccatgaacgtatcctcttataaataggtctgtgggggtaagagatgaggttctatagatcctggaatcagggatggggaatctgtggggtccctggggtgagagatgagggtctgtagattagtgatgggtggtcttttggatagtgatgagatccatggaatcaattcttgtgggtatgtagggtcagtgatgagggaatctggtgtcagtggcgggatgtgtgtggaatcagtgagagagtgtggaatcaatctgtgaaggccagatttgtggtgtcatctctcaggctgacacatcctgacctgtgtgacaatggtggaaattctatggggtcagagtgtgacagtcagttccttgccactgggtgttctgggtccggccaagggcacagattcccttacctgatcctggctggagaggcccttctcacggactcctcatgtgaaagatgggttgtcggcggttttggtttttgttttatggtgggggtgggtgggttggcttttccttttgggtttggttttgcctcttagagaccacagacacatccagcttttaggaagacatttttgtctgggcgatcgctagttcctttgggccaagccatctaatgggaatgaagctgaccattccctcagcgcaattcagatctagatggtcgctttaaggggtccactcgggggcatgcaagtgggttgtggctttgagtggcaggtgggcgggaagaaacaactaagaaagacacacgagaggtcctcaggcttgatctgtcacagctagaagaacagcttccttaacccatcaggcgccaatgggaggtgcctctgggctgcaagaggctggcagagggggacttccagacccagaaagtctgggcacagaagcctattactgccagacgctgaggagttgccgtgggaaccaagggcctttcgggccagatcagagcctttctcagacaattctttgggtaactggcaagctcctgtccagcgcacacccctatgaatgcttagtgtgccatctcgggcaagtcttctttggtctgagagccacttgtttcttaaatccctgcgctaatctcgccgtctgctcctatgtagcccaggcatttgccgcatgctggtcctttctttcctgacaggcgggcagtctccctccagcttctgggaggacagttcaaattatggaggagggggtgcatgtagggcagcagtgcccaggggagtatgggggagttgggggagcagaggctcatttttctttatagctcagattcccaagcctgtgactttgagaatctttgtcttccttgcaacatttcaatctgaggctcttgtggagagggcagagttggagccagatggaagagtggtgggagaggagtgggtggagggaacatggagaatgtttcaggtggtgtctttatttctggcaccttactttgcctactggagtttcccagtctgttccagacgccctctctagaccctgagagggcctgaggaggcatgttagttgccagtgtggtggagatggagtgccgggaggtggaggttgcagtgagccaagatcacgccactgcactccaggctgggtgacacagcgagtctctgtctcaataaataaataaataaataaacaaacaaatggaagggaaaaaacacaatataaaaaccaagtgattctaaaagtaacaatatatcataatgcctaaatatgtgtaattggtggggcatggtggctccgattatcataatgcctaaatttgtgggattggtggggtgtgatggctcccacctgtaatcctagcactttgagaggctggtggatcacctgaagtcaggagtttgagaccagcctgaccaacattgtgaaaccctgtccctactaaaaatagaaaaaaattagccaggtgttgtggcggacacctgaagtccgagctactagggaggctgaggcaggagaatcacttgaacccaggagcagaggttgtagtgagccgagattgccccattgcactccaccctgggtgacagtgtgagactccctcaaaaaaaaaagtttgtgggaccaattccaatcgagtccaggggtctcagttggccaaggcagtctcaaacttctgaccccaagtgatcttcctgtttcggcctcccaaagtgctgggattataggcgtgagccaccatgcccagcctcccctccttttcactcagggattttaaatgttttatttgctccatctgttatgtatgattgccttgacgatttcagcttgaattaaaattacatatttttgcctgtgtttattaatatttaaacatattaaaataatacatgttcataatgaaaatgaaacattacaaataaatacacaggaaaggcagtattccccttccagctccactcttgaaataaccagttaacaagatgatgaacatctttccatgatgttctccaagattcatataattatttgcaatcatacaatggcatatacagctcaggtgtggtggctcacgcatgtaattccagcactttgggagactgaaccgggtggatcatttgaggtcaggagttcaagactaccctgaccaacatagtgaaaccccatcactacaaaaaacacaaaaattatctgggcgtggtggacgcttgtattccaagctacttgggaggtggaggcatgagaatcacttgaacctgggagatgaaagttacagggagccgaaattgcattacttcactcccacctgggcgacagagtgagattccatctcaataaataaataaataaataaagataaagaaagaaagaaaaaaagaaagatgaaagaaacaaagaaaaaaggaagaaagagagaaaaagacagagaaaggaagcacgaaagcaaacaagcaagcaaccaagaaagaaagaaagaaagaaagaaagaaagaaagaaagaaagaaagaaagaaagaaagaaagaaagaaagaaaaaaatagaaagaaaaagaaatcatgtgctcaggttgctaggatcgatggtaggaacaaatcctctagcggtgaaaatgtaagaatgaaaaagaaatttctgttagtcttgtttgttgtaccccaagctctaaaaatacagccatatgtgtgaaaagatgaaaaaggcattaaatttgtgaatggaaatcataaacagaaatgtgttctgattgacagcaattgggtcaatgctatccaaggtgcaggcatccactgcgggtcttagaacacatctcctgcagataagggagggctactatataacgtttctttctttttttctttaattataaaacattctccttttttatataacaatttgccattgatatcactttaggtataaagatattaggatatctttatagtagataaaaagctaactcattatttgtaagagttaaagtatcttccactatatgagcatttaaaatgctaaagtacttttgccaccaaaaatagtgcttctgtaaatattcttttacttgtacctttattaatttttacttctgctgaaacaaattgcatgaggaaacaaatgtatgtgtataaaatgtaatatatgtatgtatatttaatatgtgtatatacaacttaatatatacacatacatacaataacataccccaatttttggttgttttttgaggtggagttttgctctgtcgcccaggttggagtgcagtggtgtgatttcagctcactgcaacctccacatcttggattcaagtgattctcctgcctcagcctcctgagtagctgggaatacaggcatctgccaccaagtccagctatctttgtctttttagtggagatgggttttcaccatgttggccaggctgctctcgaactcctgacctcaagttgtccactgactttgccctcccaacgtgctggaattacacatgtgagccaccgcgcctggcctaacatatacaatttaatgtatatacaaatatagattgggtgcagtggctcactcctgtaatcctagcacaatggggagctgaggtaggggattgtttgaacccaggagcttgaaacaagcctgggcatcatggtgaaaccctgtctgtacaaaaaacacaaaaattagttgggtgtggtggcacgtgcctgtgctctcagcttctcaggagactgaggttggaagatagctggagcccaggtggtcgaggctgcagtgagttgtgatcatgccactgcactccagcatgggtgacagagtgagaccctgtcttagacaaaagcaaatcaaactaaatataatgtttacgctctacacacttgatttctttccaaagggttatataacactgtaatttcaccagcaatatatgcgactactcatttcctacatactcactatcacttgtgtgcagtcgaggaaagttagtaggcctgaattgcccaaacctggcatactccaaagaatggtgtgactctagcccagctcctgggaaataacctctaggtccttggaatctcctgcctatctgggagttaacaatgtgatttattgtggggaccttggaccatgcagtgtcagcttgaccttgggaagggtggagacagagaaaccaaggtcatccaaatgggtgctcttgtccatgtgaccaacctccagtaaaaccctcaaccccaaggctcaggtaagcttcttgttggggagtattttctgtactttctgccacatatcgctgggtgaattaagcactgttcacatgatgccactgggagaggacaactggaagcttgtgcttggtttctcctggactctgccctatgcacccttttctgctgctgattttaatctgtatccttttgttgtaataaactataactgtgagtataacagcttgactcagttttgtgagtccttctaatcaatcactgaacttttgggaccccaaaacacaatgttgtttcttaattgaattttccatgttatgtaagaaacctatgtgcataattgaaaatcccacactaagaaagagctttccatgcagtctactccccaacctgtttctccaatactcccaagtctactttctgaataatcaaatatttaaattttctaaactatttataatccatatatctgagtgcttatctctgttatataatagatagatcttcctccttctgttttttttttttttttttttttttctgagacagagtcttgctatgtcactcaggctggagtgcagtggcacgatcttggctcaccgcaagctccacctcccgggttcactccattctgctgcctcagcctccccagcagctgggactacaggcacccgtcaccagtcctggctaattttttttttatttttagtagagatggggtttcaccgtgttagccaggatggtcttgatctcctgacctcgtgatccgcctgccttggcctcccaaagtgctgggattacaggcatgagccactgcgcctggcccctctttcttaatatatcaacttgatatattacctgatggcttcgtgttctgatagctgatgacttggctgacactcaccccttaccacagtgcctgaaccactttccttatatgatgctctcactattttctttttcttttcttttcttcttcttcttctttttttttttttttttgagacagagtcttgctctgtcgcccaggctagagtgcagtggtgcaatctcagctcactgcaacctctgcctcccagtttcaagtgattcacctgcctcagcctcatgagtagctgggattacaggcatgagacaccatgcccagctattttttgtatttttagtagaagcggggtttcgccatcttggccaggctggtctcaaactcctgatcttgtgatccacccacctcggcctccaaaagtgttgggattaccggtgtgagccaccgaccccaccactcgcactgttttcaatggctctgttggttaccattcacaacattcaacaatcagacttatacctcatttatttatttatttttaattttttctgtttttaggtttaagggataaatgtgcaggcttgttacatgggtaaattgcatgtcactggggtttggtgtacaaatgatattgtcacccaggtagtaaccacagtacccaatagttttttgacccatagcctcatgccatcctccccactcaagcagaccccagtgtctattgatcccatctgtgtgtccatgtgtactcaatgtttagctcccacttataagtgagaccatgggtatttggttacctgatgctgcattaattcatttaggataatggcctccagctgcatccatgttgcttcaagggacatggtttctttttctatggctatgtagtattccatggtgtataattaccacattttcgttatccaatccactgctgatgggcatcatatatgccacttcaaattatactactaggctacagtaaccaaaatagcatagtagtgtacaaatacagacacatagaccaatgggatggttagaaaacccagaaaaaaattaacacacctacaaccatgtgatctttgacaaagtcaacaaaagtgagcaatgaggaaaggactccctattcaacaaatgtttctgggataactggctacccacatgcagaagactgagtctgagccccctacctttcaccatatacaaaaattaactccaaatggattaaagatttaaatataagaccccaaactataaaaatcctggaagacaacctaggaaacactcttctcaacatcggccttggcaaataatttttggctaagattccaaaaaagcaattgcagcaaaaacaaaaatagacaagtgttacctaattaagccagaagctcggaggccaggttgggcagatcacaaggtcaggagtttgagaccagcctgaccaacatggtgaaaccctgtctctaataaaaatacaaaaattaggtggtggtagtgcacacctgtaatcccagctattcaggaggctgaggcaggagaattgcttgaacctaggaggcagaggttgcagtgagccgagatcgcaccactgcactccagcctgggtgacagagcaagactgcctcaaaaaaaaaaattaaagtaaaataaaagcgtaaacacaacaagacaaactatcaacagagtaaacaaaccacagaatgggagaagatattcacaaacgatgtatccaacaaaggcctaataatatccagaatctatagacaacttaaacaaatggaacccttactctgtagcaagttctgtatgcataagcctctctttgttcttattttggtggcctctgtttatttacacaaagaggaagaactgctattcccataaatcatggctttcaaaatggtcacagttcactgggcatgcttgctcatgcctgtaattctatcattttgagagaccgaggtgggcagatcacgaggtcaggagatcaaggccatcctggccaacccagtgaaaccccatctctaccaagaatacaaaaacattagccatgattggtggcatgcacctataatcccagctactcaggaggctgaggcaggagaatcacctgaatccaggaggcagaggttgcagtgagccgagatcatgccactgcactccagcctggatgacagagtaagactgtctcaaaaaacccaaactggtcaggctcggtggctcacgcctgtaatcccagcactttgggaggctgaggcaggtggatcacaaggtcaagaattcaacaccagcctggccaagatggcgaatccccaactctactaaaaaatacaaaaattagccaggcacagtggcaggcacctgtgatcctagctacttgggaggctgaggcaggagaatcacttgaacccaggaggcagaggttgcagtgagctgagttctcaccaccgcactccagcctgggcaatagagtgagaatctgtctcaaaaaaaaaaaaaaaaaacccatggagaaactccatctctactaaaaatacaaaattagccaggcttggtggcacatgcctgtaatcccagctacttgggaggctgaggcaagagaatcacttgaacctgggaggcagaggtttcggggaggtggaggttgaggtgagccaggatcgtggcattgcactacagcctgggcaacaagagtaaaactctctctaaacaaacaaacaaacaaacaaacaaaacaaaacaaagaaaagtacacacaatttatttcctggtttgtgataatctgtgaaatatattttgaaatgaattggaattcaatacagtactattcaaaccccaaatactcctaatatttcctttcccagatgatgacctggtactcttcctagggcttgatttctccctacaggtccccagtacaagtatttgtgattctgagtcaattcattgtctacatgtgtgacaatgcaatgctcttgttgtagagtaccaagatgaggcaggtccaaactgcacatttgtagagaacatagtatgtgtgcaattgaacatgtatgtggttgtgatactgaaaacaatacaaacttaggccaggcgcaatggctgatgcctgtaatcttagcactttgggaggcagaggcatggaggtcacctgaggtcaggagtttgagaccagcctggccaacctgctgaaaccctgtctctacaaaaaattagctgggtgtggtggcaggcacctgtaattccacctactcaggaggctgaggtgggagagtcgcttgaacccaagaggtggaggttgcagtgagctaccactgcattccagcctgggtgacaagagtgaaactgcatcaagaaaaaaaaaaaaattggccttgggcatttctttaggttggctcctgtgttctatttatagcatgcctttatcagggggttggggtgtgggactaattaccaactttctggcaccataaagtgttttgattcatctggtattttccctgacccagacgtggaataaaccatttattaaagatccttggtttctttcattgaaaagtattatttacaaagcaccaaaatcttgggctgggtgaggtggctcaggtctgtaatctcaacattttgggaggctgaggcaggaggatcccttgaggccaacagtttgagacaagcttgggcaacgcagtgagacccccatctctatttttaaaaaccaaacaaaaacaaaatcgccaagatcggggtgacacgtgtgctcattgctatgggtgtgtcattgcttctaggccctcttagtgggcagaactaggaaatacattgtatgtatactaacacacatgccacatgcctaattcgtatatttattcagccttgctggaagcattctttttttttttttccagacagggtctcactctgtcacctaggatggagagcagtggcataatctcagatcaatgcaacctccacctcccaggttcaagtgattctcctgcctcaacctcctgagtagttgggactacagatgcatgccaccatgcctggctaatttttgtgtttttagttgagacagggtttcaccatgttggccaggctggtctggaactcctgacctcagcggatctgcctcccttggcttcccaaagtgctggaattacaggcatgggcctctgtgcctggccacgcattcttaatgggagtgatattgcccctaagagggtgaacattggttattgaaggtaaaatgaattatagttgttgcagtggtttgtggccttccacaattttttttttttttttcggagagggaggctcactctgtcacccaggctggagtgcggtggtgcaatctctgctcactgcaacctccacctcctgggttcaagtgattctcctgcctcagtctcccaagtagctgggattactggcacacactaccacgctcagataatttttgtattttttgtagagacagagtttcaccatgttggccaggctggtctagaactactgatctcaagtgatctgcctgcctcggactcccaaagttctgggattacaggtatgagccaccatgcctggcctattgcacaaaattttactccttggtatttaatttctctcaaatatgatgggcagcattaatcattttatggaagataaaaaatccatgcaagatcaggccatgcacggtgactcacacctgtaatctcagcactttgggagggcaaggaaggtggatcactgaaattcagtagttcaagaccagcctggccaacatagtaaaaccctgtgtcaactaaaaatacaaaacaattacccagaagtggtggcacctgcctgtaatcccagctacatgggaggctgaagcaggaaaatcgcttgaacccaggaggcagaggttgcagtgagtggatcgtgccaccgcccttcatcctgggtgacagagtgagcctccacctcaaaaaaaaaaaaaaaaaaaaaatctttgcaagatcagtgttacaaaatgatggcaaattgatggctatacctggaagactttttttttgattgaatgctctatcccaaagttatatgagaggtggtctctgtgtgtctattgactgccttgtggatagtatttatgattgatcctcagtgctttgggaattatgtaaaatagtttatattacgaaagtaattcaacctagcattaattgtgttaagtgttgaaaatgaaaagtgttgactacatctgaatgaatgaatatctggccaactggttttgtttttttgtttgtttgtttgtttgtttttgtttttacagatggagactcactctgttgcccaggctggaatgcagtggcatgatcttggctcactgcaacctccacttcctgggttctagcaagtctcctgtctcagcctcccgtgtagcagggactacaggtacatgcccccacacccagctaattttttgtattttagtaaagacggggtttcaccctgttgcccaggctggtcttgaaatcctgagttcaggcaatccacccacctcagcctcccaaagtgctaggattacatgcttgagccaccgcgcccagcctagcttacagttttattgaaaaccctatttaactcaaaacagcttgtttcttatgaataatagtctttgtttgtttgtttttacaaacggctatgaaatcatcaagatttgtggatcatcaataaaagaaacatcctgataaagtcgagaaacagaatatttaaaaagtttaaaatagaattttgaactgtgacactgttacttcttatttaagaaagacaagctgcggggggaggtggctcacacctgtaatcccaacactttgggaggccgaggtgggtgtatcacgtgagcccaggagttggagaccagcctgggtaatatggtgaaatcttgtctctactaaaaacacaaaaactagcctggcatggtgtgtgcacctgtaattccaggtactcgggaggctgaggcaggagactcgcttcaacctgagaggcggaggatgcaatgagccgagattgcagcaccatgctccagcctggactatagagcaatacttggtctcaaaaaaaaaaaaaaaaaaaaaaaaaggataagcaaaccaattatgatgaaataattgccttacaaaattgcagaaataggccaggcgtggtgactcacgcctgtaatcccagcaatttgggaggccgaggcaggcgcatcacctgaggtcgggagtttgagaccagtctggccaaaatggcgaaaccccgtctctactaaaaatactaagttagccaggcgtggtggcacacacctgtaatcccagctactcgggaggctgaggcaggagaatcatttgagtcccggagacggagcttgcagtgagctgagatcatgccactgcactccagcctggctaacacagcaaaactctgtctcaaaaaaaaaaaaaaaaaaaaaaagaaaaagaaaagaaaagattacagaaatcattgtaaaaccccatagtgctttatacttgctgaaactgtcacaggactcacatgagagacggtaacttcaatagtgatgtaatacattgccactatttcacaatcactcctattgagcaataattcaattcaaagatgcattaatgagatgtcaggtaataccaaagagtagctgattaatcaagtaagtttcctattcagatcaatgaaatcagttactgagagtaaggcctgacaataggacatgtttgttatttcaataatgactgcaaactagaagaagagatattgtttgtaaaatctttagacgctgaccgtaccagagcatctattcttgctgctataaaaacttggtttggggctgggagcagtggctcacgcctgtaatctcagcactatcattttctcacatgaatcggaaaatgccgacgtctgcatcctaaatctaaactaatttcccactcacttgctaagcttcagtcacaccaggctgctttctgtttctggaatgctccaagtgctctctgatttttcagggccttcagtgtaactgtgcctctgcttggaatacccttccacactgatggctcctcaccaccaaagctcgagggttatctctcagacacccgtcctatcaatgctacgggaaagatccctcaagttactgcttataccacctattgatatatttcatagtatttatcacaatataaaattacttcattttccccttttaatttaaaatcttttttttttctccagacaagaatgtaaacctcatgtgggcagcagacatgtctgcttacttttttttgagacggagtctggctctgtcacccaggctggagtgcaacggcgcgatcccggctcactgcaacctctacctcccgggttcaagcgattctgctgtcccagccttccaagaagctgagattacaggcgcccaccaggcccggctaatttttgtatttttagtaggggagcagtcgggctctggactacatttcccggaggattctgcaggccaataccacgtctcgcgagatttcggcttcctcttagccaggtggcagattctttcgctgtgcccaattagctgctgccgcgccttggagtccggagtaacttggccaggctggccccgagcggaactggagaaagctgagggtgaggaatccggctccggtccttttgtgtgtggagggctgaggagaggagtttgcgtgtgtgattgccatggttgccgtgggtcttcgtggtctgtgactgtggctgcgtggtgctgactctgggtgatcaagtgggcgcttgtgactgtgcgcgctcggagtggatgtgtgtgtcctggacgagccgcgttgtgtgtgcggatgtggacaaccggtgactgtgtggttggggctgcgtgtcccagggtggatgtgtgactttgcgtgtgtgtgcagtactgtgtgtgcgtgagttgcaggtctgtggctgtgcaggtgcaacttgtgtggccccgtggtctgtgtgagagaggagagtgtgactggctgtgaggcagagggtaagtggatatagggaggcatgtgtgtgattggaactttgtgtgtccccttgagagaaaaaaacctttagggagttagagcgggtccttggtaaaactcctttaaacagagaaacagccagaaaaatcaggctgcaggcacagagaaggaaaactagcaaagggggttgtcctaaagacattcctcagctgcactgataagggaccgaggcccaacatagaaatgcctttgtcctttgtgtgaccagcgggcttccaggaaatagtcgcttttttgtgggcatgtatacagtgggctctgttagattttgaagggaaggcgaaggttaaagaaagagagttggcggctctatggaggggaccaactaaatgccagagcccactgccgcttacaagctggagtaattataggcctgggcaggaggggtctgggcagtatagcttgttgcctgggagaatgttggtaaggatgtttcttgggcctttccccagcaggatgtgataaggaagtcaggcggttggggaggatgtttctcgcagcccaaaccccagtggaatgtttccctctgaacagggtctgtgaaatggtgggggcttacaaatcggtgcagcttggactaacaggctccggcggccactttgttttctggacatgctttggactgtgagccgagcctctatgaatcatcacttcagcctctgattggtcctgggccaaactttcacttcagcccctgattggtcttgggccaaaatttcacttcagcctctgattggtcccaggctaaggtcccgggccaagcgaagtcgtgctatctccaagacagctcacagaccagtgagcacattcttcctcttcccagttcacaaaacccccagattcagcctcctagttggcaaccctctttcgggtcccctctctgctggggagagctttcttcttttgcttattaaacttctgttccaaactcattctttgtgtccacgttccttaatattcttggctgtgagagaaagaaggcaaagacaagagcctttatcctaacaactcaattgttggagagaagattcatgcatattctatgtggcatcacacgccatagccctgggattgaaagccatgcagtttaagggatggtgttaatctcagtccaaataggtaataagatctttcacgttgctatattttaggggtaggaatgagattgggggtttgatcaatagtttgtacccataggaccagggatttgcccagtcatctgtgagtaaatgcttgggccagtttccatgcctgtattgaattaaatactcatacggttctgtgattttgtcaaatacaaatttggtctttgtccctatttcctggcatacaactcctaaaatccttggaatgtcctaagggcttgctgtttttttttttttttttttttttttttttttgaaacggagtcttgctctgtaacccaggctggagtgcagtggcgcaatctccactcactgcaacctctgcctcccgggttcaagcaattcttctgcttcagccttccgagtggactacaggcatgtgccaccatgcccggctaatttttgtctttgttttcttctttagtagagacggggtttcaccatattggccagtctggtctcgaactcctaacctcaagtgatctgcctgcctcgggctcccaaagtgttgggattacaggcgtgagccaccgcacccaggctttggctttttatatgttagtgattgaccgatagcttcaggatgtggactggtcatcagaaagaccaaggcaggattagagggttgggactttcagcccctaccctcccacccctggggagtggaggggactgaggattaagttgatggcaagtggctaatggtttaatcaatcatgcatatgtaatgaggccaccttacaaaccccaaaggagtggattcggagagcttccagagagctgaacacatggaggttcctggagggttgtgcccagggaggggatggaagctctgtgccccttcccccatacctcgtgctaggcatctcttcatctatatcctttggaatatccttataatcaaatagtaaatgtgtttccgtgaggtttgtgagccattttattctagcaaattaatcaaaccaaagaggaggtcataggaaccccaaattaaacccatcagtcagaagttccagaggctgggacttgtgactggtgtctgaaaggggggcagttttgggggctgagccctcaatctgtgaggtgacactgtcttatggcagatagtgtcagaatcgaattggtggacacccagctggtgtctgctgcagaactgattccttgcttggtgaaagggagaaatcgcctcatattttgaggccacagaagtcttctgggtagattgttgtgtttttggtgtgaagcagaggaagaacacaggttgagttttttccaaatgggttcacattgggggtcctcaacctcaaatccatcaactccatcgctgaatttttatttatgtatttatttttatttatgaggtagagtctcactctgtctcccaggctggagttcagtggcacgatctcagctcattgcagccttgatctcctatgcccaagagatccttctacctcagcctgccaaataagctgaaaccagaggcacacactagcactatggtgtaattaaaaataatttacagtagagaagaagactcactatgttgtctgggctggtcttgaactcctgagttcaagtgatcctccccctctgcctccaaagtgctatgattacaggcatgagctgcctcacctatcactgattttctttttctttctttctttctttctctttctttctttctttcttttttttttttttgacagagtctcactctgccttgcctaggctgaactgcagtggtgcaatcttggttcactgcagcctccacctcccagattcaagtgattctcctgtctcagcctcctgaatagttgggattacacgtgcccgccaccacaccagaccaatttttgtatttttagtagagacagggtttcaccgtattggccaggctggtcacgaactcctgatctcaggtgatctacctgccttggcctccaaaagtgcagtggcagggtcagggcatactgcagccttgacctctggggctgaagggatcctccctcctcagcctcccaagtatctggagtataggcatatggcaccatgccaggctaatatttgtaatttttgcacagacggggttttgccatgttgcccagtctggtcttgaactcctgagctccaacaatcttcccacctgagcctcccaaagttctgggattacagggaagagccactgcacccggcctatcactgcatttttaaagggaaggaggactatagtgagattcactaaggcttacagaaaaggtagaaccccagatagatttaaagacagagattataatattcttgagatgataatatccaaatttagctttcatagatagggaaatttgaagtacatcagactataagttggcattttgtgcaactaattaaaactacgtttgaaagagagcaattgcatatttgttactgagtaatattaagcaaccatgaaaataaatagaaataaccaagaaattgttatatttaaatcctccctccttttttggaaagagaagtattgatatttttggattctaatcaaaacttctcttttaaaataaaattgatgattctatggagatagggagggaataacctatgtttattgaacacctaatattccacttacccaaatgtcatttattctatattctaggtttttgttgagacagggtctttcttgctctgttaccaagcctagagtgcagtggggtggtcacagctcacagaggtataccaccatgcctggcattttattttattttattattttaattattttattttattattattttattttattttattttattttattttattttattttattttattttattttattttaatttttgcagagacggtgtctccctatatttcccaggcttgacttgaacttctgggatcaagcaatcctcctgccttggcatcccaaagtgctgggattatacgcataagccactgtgttcagccaatattatagtcttgatagtagaagtgtctcagtgtactggaaaactttgtctaaattttgaaaaaatattacaaaacacgttggttttatttggccaatactgatttctttgctccatcattatttattggcattattagcctgttgactttcaatttccttacatccctttcactccatttcttttgttttgcaccccaaatagaaactcttttttttttttagatggattctcgctcttggctcttgtgacccaggctagagtgcagtggtgcagtcttatcactgtaatcttcaccttccaggttcaggcaattctcctgcctcagcctcccaagtagcctagattacaggcatgcgccactacaccctgctaattttttgtattcttttttttttttcttgagatgcagtttcactcttgttgcccaggctggagtgcaatggcatgaactctgctcactgcaacttctgcctcccaggttcaagtgattctcctgcttcagcctcccaagtagctgggattagagggtgagccaccacacccgactaatttttgtatttttagtagagacagggttttgccatgttggacagtctggtctggaactcctgatctcaagtcatccacctgccttggcctcccaaagcgctgagattacaggcatgagccactgtgtccagcttttttgtatttttatatttatttatattttgatagacagtctggctctgttgcccaggctggagtgcagtggcacagtctcggctcactgcaacctccgcctcccaggctgaagtgattctcctgcctctgactccccagtagctggtattacaggcacctgctaccacacctggctaccttttgtattttaattagagacagggtttcaccatgttggccaggctggtcttgaactcctgacctcaggtgatctgcccaccttggcctcccaaagtggccttgcttgaggccaggagtttgagaccagcctggccaacatggtaaaacctgctctttaccaaaaatacaaaaaaaaaattagccaggtatggtggtgtgtgcctgtattccaagctactttgatggttgagtcacaaaaaacacttgaacccaggaggcagaggttgcagtgagctgtgatcacctcactgcactgtagcctgggtaacagattgagacttgtctcaagaaaaaaaaaattcttggcaggacgtggtggctcacacctgtactcccagcattttgggaggccaaggtgggttgatcacctgaggtcaggagtttgagaccagcctgactaacatggagaaactctgtctctcctaaaaatacaaaattagctgggcgtggtgctgcgtgcctgtaatcccagctactcaggagggtgaggcaggagaatcgcttgaacccaggaggcagaagttgcagtgagccgagatcacaccactgcactccagcctgggcaacaagagcaaaactccgtctcaaaaaaagaaaaaaaaatctttactttggataaatacttagaaatggaatttccaggtcggcctttagatattattaatggatttaatatgaaaaacctttacttgaggatgtataaagctttaaaagacagggtccctattcttaagttataagtaaagcagcatttgtaaggtaatattcagaaaacatcagataatatcctataaagtcctcctgttcttgctgatgacattggatggccagttaaggatgacacttcattctgtcctctgcaaccacggtcctgacatgtctaaatgatacttgccctatgagaacactgtggatgtgaaagcatttcctcaggttatctttttgacctgctggttttaatctaatgatgggatatccaaagtgaatctaactgagtgacatgattgtggatctgttggggggaatcagagacagctagagcaagggcagacacgtgctgaactcatctgtcttaagagccgaagaaagcagcagtgttactagcagagctactgcacatctgtacacgtggctccaatggctctgacctgtttttttcccagtatgaacctaatacatgaggcaagttagaaaatcagagttggccaggcatggtggctcatgcctgtaatcctagtactttgggacccaacgtgggtggatcacttgaggccacgagttcgagaccatcctcggcaacacagtgaaaccccgtctctactaaaattacaaaaattagctgggtgtggtggcaggcacctgtaatcccagctatgggaggctgaggttgcagtgagccaagatcaggccactgcacttcagcctgggtgacagagcaaggctgtctcaagacaaaaaaaaagggaaaggaaaggaaagaaaatcacagcttgttaggcacttgcagctaaacacatatgcacaaaaattattcagtaaaagcaaaacagttttggtgtatcttgagattttgttttatatccaaaggaagactatatctttcatctttgaactagtctttggaaaatgccttctatataacaaatgttatagttttcttctaattaggtcttgaggtctctcaggagaatggctataaactctacctcactctaatggggctctaggggaggggcctgtgggtctttagagtagcctttcactggacatttctttttcctggaccacagcctaatgctcaagtatctgacccatgaccaggtgtctcacaggaaacttgtttatactggcagatgcccttgtaacttttgtctgacctgtgtgcagtttattcctaccatgatacccactctttttttttttttttttgagatgcagtctccatctgttaccaggctggagtgctgtggcatgaccttggttcactgcaacctccaccatctgggttcaagcaattctcctgcctcagcctcccgagtagctgggactacaggcacgtgccaccatgcacagctaatttttgtatttttagtagagtcagagattcaccatgttgtccaggatggttttgatcccttgacctcatgatctgccctactcagcctcccaaagttctgggattacaggcgtgagccaccgcacctggcctttttttttttttttttttttgagacaggatcttgctctggtgcctaggctggagtgcagtggcaggatcacagctcactgcggccttgacctcctaggctcaagcaaccctcccacctcagcctcccaagtagctgggactagaggcatgtcccactacatctggctaatttgtatatgatatgtatttttgtagagatagggttttgccatgttgcccaggttgatcttgaactcctgagttcaagcaattcacctgccttggcctcccaaagtgctgtgataacaggtgtgggttaccacacccagccaatgtacatttaattatcgaagtgctatctatactattttatggaagtactaattatcaaagtgcaatagaggttttgttgttgttgttgttgtttttcttttgagacagagtttcactcttattgcccaggctggagtgagtggtgcgatctcggctcactgcaacctccacctcccaggttcaagcgattctcctgcctcagcctcccaagtagctgggattacagacatgtgtcaccacacccagctaattttatatttttaatagagactaaaatggtctctccatgttggtcagactggtctcgaactcctgacctcaggcgatccatccgccttggcctcccaaagtgctgggtttacaggtgtgagccactgtgcccggccaatagaggtttttaacctttttgtagatatttttgaaagatcctgtcttcctttaagaaaagagacaaggctgggtgtggtggctcatgcctgtaatcccagcactttgggaggccaaagcaggtggattgcttgagctcaggagtttgagagtagcctggccaaatggcaaaccctcatttctactaaaaaaaaaaaaaaaaattagctggacatggtggcgcacgcttataatcaaagctaatcaaagctaaggtgagaggatcacctgagcctgggaggttgcggctgcagtgagctgtgattgtgccactgcactccagcctgggcaacagaatgagaccctgtctcaaagtgaaaacaaaaacaaaaaaatgaaacaagagaaaaaaaaacaagaaagaaaatggtaagggggaagtgcctatttattaagcttttgttgtaaatagtaacttgcatatcagatgtttactgtaatattcttgaagctttgccaagcctacagcttgctgtgtgcttttcaactctatttcatttatttgggaaataatatatcaatgtactttattcattcccagctctaaccatggaatactgggaatgtccctttctgtgaaggaggtttgtcagccacaacaggaatattcatgaacatgaaggtactttgttgaagtcacactaatttttttactcttccccactctcagcctagccggtctgcacactacattctctccatccttcagcacccttccatctcttccttcatcttaaaaacctttcctttaatttcaacagcgctgcctgggtttgtcatttcaggggttgggcatgttccaggatctgtctatcgacttctctcaggaggaatgggagggcctggacactgctcagaaggacttatagagagatgtaatgatggagaactatagcagcctggtctcactaggtaaggatgtctatccccaaataactcatgagttttggctgtagctttcacttgtctgggtgacttttcacctgctgcctagggaattgttttgtgtttagtagattaatagatgggcagctctttggggtccttccatcttctccatgcttcagacctttacaccttcctctagtccttcgtgagtactaagggactaactttgaattcaggaacagcaggagtatgtcttacttcttttctttctttctttctttctttccttcttttttacttactttctttctttctttttcttctttctttcttttttttttttttgagatgaagtctcactctatcgcccaggctggagtgcaatggtgcgatctcggttcactccaaccttcatcttgggttcaagcaattctcacgtctcagcctcctgagtagctgggattacaggcactggccaccatgtctgggcaatttttgtgtttttagtagagacgggatttcaccatgttggtcagtctggtcttgaactcctgacctcaagcaatccacctgttttggcctcctaaagtgctgggattacaggagtgagccactatgcctggccatcttacttcttttcttataaacaggtctctctatcccaaagcctgatgtgatttccttactggagcaagggaaagagtcctgcatggtttcaagggacgtaccaggaggatggtgcccaggtgagtaaggactgagcagatggggaaggcactgctgtttagaacccagcccatcagggaggcagcaccataaaggtattggttgaggaatctcttctgcaaggtcccatgtaagagttgtggcctaagacacatggaggaaagtcaagatacccccaccacacacattttttttaatttttttaatttgagagagattctttctcagtcacccaggctggagaacagtgatgcaatctcggctcactgcaaccttcacccgcgggttgaagcgattctcctgcctcagcctctaaaggaactggcattataggcacctgccaccatgcccagctaatttttgtatttttagtagagaaggcgtttcaccatgttggctaggctggcctcgaactcctgacctcaggtgattcacctgccttggcctctgaaagtgctggtattacaggtgtgagccactgtgtctggccaagaacccccttttacctccacctcttggacagtctgtgctaccctcttgtcataatttctttccatttcaaagaataatgctcccttcttcagaagccatcctgtttcctctatcttggagctacttctttccctttaaaatttaaacccatgtagttgctttaaaaacaaatcttttagaatatatttatttttcatactgatccttgacttttttttgccttgtcttttcttgtctagttttcctttaatgcagccatttcatgcatcaatggatattcattcagcactctttttttttttttggatacagagtctcactctgtagcccgggctggagtgcagtggtgtgatcttgtctcactggaagccaataagaaacgcttggggatgacctccctacaagcacaggaaaaccattcctgcgcatttctgcgctggaacgcctacctttagtgccgtttcctgcgctttcttgcagatttgtatcaggcactggagaacctcccacctggtccatgcccggctcccggtgagcaccgagacccaaccttgtgcacagccagtcttgtcatcaacaaacagggtagtaaattataaaaaataaaataaaggaaatgtagctgggcgtggtggcatgcgcctgtaatcccagctactccggaggctgatgcaggagaatcgcttgaacccaggaggtgaaggttgcagtgaggcgagatcgcgccactgcgctccagcgtggatggcaagagcgaaactccttctcgaaataataaataaaataaaggaaatagggccgggcatggtggctcacgcctgtaattccagcacttttggtggccgaggcgggcagatcacttgaggtcagaagttcgagaccagtctggccaacatggtgaaaccccttctctactaaaaataaacaattagccaggcatggtggcgggagcctgtaatcccagctatttgtgaggcggagacacaagaatcgcttgaatcccggagacagaggttgcagtgagccgagctcgtgccactgcgctccagcctgggcgacagagcaagactccatcttaaaataaaataggccggccgagggtgctcatgcctgtaatcacagcattttggaggctgaggcgggtggattgcctgagctcaggagttcaagaccatcctggcctacatggtgaaaccccatctctactaaaaatgcaaaaattagccgggcatggtggcgcatgcctgtaatcctagctactttggaggctgaggcaggagaacagtttcaacccaggaggcggaagttgcagtgagccgagaccgccacattgcactccagcttgggcaagaggattgaaactccatcacaaaaataaataaataaataaataaataaataaatataaaagaaatagacaaagcaaatcttaatgcatgaactcaaacaaatgctttcactgccaggctccatctttgcaaaactgaacctaggacaatgtgaacgtttctaactagcaattctggaggacagatcagggaggcagcgtgagcttgcttttctgcaatttaattgactggtcagtaaagtcagtgtttgcaggcattttcaatgttctatagtgggcttcagtgcctgtggcaggccaggtttgcaatagcaaccagaacagtttctactaaccctttactataattttgatgaatgcataagttaacgttaaagaaatggagaaactggtgcctgagtatcacggatggaatgtgaaaacaaacccactgagaccccgtctgggttttctcagaccctaaaatctgatcgaataatgatagcgttcgtacacattcacctcggcctgtcttaagattcaaaaactttccaagactctagggaaatctttccagacgctagacccgagttaaagattagatgttgattgaatgaaacactcctgcttgtaggtgcaatcccacatggagcttaagatatatataagcactagaaaaaaaaacttgtaactttgagttgatctggtgatttacctggcgcttctccctgtaagtggctgcagaaataaacttccttctttcccagtctgtctgtatcttagtattgaacaattgcgatggagctgcccagcaaagtcctcttctatgtggttatctgggactccttttggagggaacattttaaattttccatttcaaagcattctgttggccttcttacactgtttttctctgcctatcctgggacctgagttctcctggacatgaatctgcagccacagagcctagaagctcattcctccacattctgtgactgttccccaaacacagggagaatttgcagaaaataagcccaaaaatcttgccattctttgcaataaaaccccacattacaaactgctgaaaacaggattttagcctgaataggttgttcctctatttgaaagcctttacaatttcggagggaagtttccaaatcaatcagtaagtaccccccactccaggtttatccttatgtaaagtgccccctttgcacatgcaagattgaataaaccttgaaaatattatgctaagtgaaagaagccggtcacaaaggaccacatggtatgtaattccatttaaataaaatgtccaaaatagaccaacacatagaaacagaaagtagatttgtggtggcccaggattaggggagttggggggaaatggagggatatggtgtttacttcagggtaatgaaaatgatctaaaatttattgtggtgatgtttgcataacagtgcaaatatactgaaaaccactgaattttacactttaaatcagtggcttctgtggtatgttatcaatatttctcaataaaacttcaaaaaaatagtgcctatctgtctttttgtgtattattcctccagagtccagtccatagtttttacatttgacgaagaaattaagattttctttcttcttcctcttcttttttttttgagacagaatctccctctgttgcccagactggagggtattggcacaatcttggctcagtgcaacctccaggctaatttttgtatttttagtagagacagcgtttcaccatggtggctacactggtctcacacttctgacctcaagtgagtcccccaccttggtttccaaaattgctgtgattacaggcatgagccaccgcacccagcccaagattaagttttgttgttttgatgccctagggacatcttattctaccttaatttctgacgcatcatctcggtggaaattttacattaggccccaaagtattttcctctttttaagattttatcagctgagtacagtggctcacacctgtaatctcagtactttgggaggccaaggtgggaggatcagttgagcccaggagttcaagaccagtctctgcaatatagtgagacacacatatctacaaaaaaattttaattaggtgggcatattggtgcatgcctgtggtctcagcttactacataggctgaggagggaggatcacttgagcccaggaggttgaggctacagtggccatgattataccactgcactccagcctgggggacagagcgataacctgtcttaaaaaaaaaattgattggaattttttttagaaaacaaagtatacacttagtgacttgatacaaatgaatgaatttgataacttacagaaaccaaaacaaataaataaataaaaacccaaagccattcttcttatgtgaatctctggtgtctctgaattataagaattgtgaattatgattaataacaaatacgcatgacaaggactcagtaagggataggcattaataaactgcaatgcatacttactggagtaaggcctttaaagatgtacaagaaaaagaaagaaaaggcattgaaaaattgcattgcctaccaaaatgctaaagtttacctaagtccattaatcagcacacacacacacacacacacacacacacacacacacaggcaatgggtgtgtaaaatggtcaacacagtctcctatgaatgtatccttttattaataggtctgtgggggtaagagatgaggttctgtagatcctggaatcagggatggggaatctgtggggtccctggggtgagagatgacaatctgtagattatgatgggtagtctttgggatagtgatgagatccatggaatcaattcttgtgggtatgtagggtcagtgatgagggaatctggtgtcagtgatgggatgtgtgtggaatcaatctgtgaaagccagatttgtggtgtcatctctcaggctgacacatcctgatctgtgtgtcagtggtggaaattctatgaggtcagagtgtgactgtgaggtccctgacactgtgtgttctgggtctggccaagtgcatagattcccttgcctggtcctggctggagaggcccttctcaaggactcctcacatgaaaggtgggttggcggtgggttttgtttttgtttttgttttgtggaggtgggggtgggttggctttttctttagggtttagttttgcctcttagagatcacagacacatccagcttttaggaagaaatttttgtctgagtggtcgctaggtcctttgggccaagccatctaatgggagtaaagctgaccattccctcagcgcggttcacatctaggcagtcgttttaaggtgtcctcaaggtggtgtgcaagtgggttgtggctttgagtggcaggtgtgcgggaagaaacaactaagaagacccaggagcgctcctaggctggatctgtcacagctggaagaacagcctccctaacccatcaggcgccaatgggatgtacctctgggctgtgagaggctggtggagttgggacctccagacctagagattatgggcacagaaacctattactgccagacgctgaggcgttgccatgggatccaagggtgtttcgggtcagctcagagcctttctcagataattgtttcggtaactggggagctgctgtccagcacacgcccctatgaaggcttaatgtgccgtctcccgcagagtcttctttggtctgagagccacttgtttcttacatccctgtgctaatctctccatctgctcctacatactccaggcatttgccacatgctggtcctctctttcctgacaggcgagccgtctctccagcttctgtgaggacagttcaaattatggaggagggggcaggtgaagggcagcagtgctgaggggagtaccaggcagttgggggagcaggggctcatttttctttgtagctcagattcctaagcctgtgactttgagtatcggtgtcttccttgcaatgtttcaatctgaggttcttggggagagtgcagaattggagcccgatggaagcctgatggggagagggttgggtggagggcacatggagaatgtgtcaggtgtgtctattcctggaaccttactttgcctgctggagtttcccagtctgttccagatgcactctctcgaccctgaagggacctgaggggggatgttggtcgccagtgtgtgctcccctggactcgattggaattggtcccacaaagtgttatttatttatttatttatttatttatttatttatttatttatttggagggagtctccctctgtcacccaggctggagtgcagtgggacaatctcagctcactgcaacctctgattcccaggttcaagtgattctcctgtttcagcctccctagtagctgggactacaggtgtccgccaccacaccttgctaaattttttatttttagtagaggcagggtttcacaatgttgatcaggctggtgtcgaactcctgaccaggtgatcgacccaccttggcctctcaaagtgctgggattacaggcgggagccatcacaccccgccaatcccacaaatttaggcattatggtacattgctacttttgaatcacttatttttttagttgtgttttcccccctccttttattgattgattgacacagagtctcactgtttcacccagactgaactgcagtggcacaatctcggttcattgaaacctctgcttcccgggttcaagcgattctcccacctcaaccttccaagtagctgggattacaggtgcatgccatcatgcctggctaatttttgtattttcagtagggacagggtttcaccatattggctaaactggtctcgaacttctgaccccaagtgatcctcctgccttggcctccccaagtgctgacataagcatgagactccttgcctggacttccctccttttccttcagggattttaaatgttttctttcctccatctatttaattatatgtgattgccttgaggatttcagcttgaattaaaattacatatatttacctgtctttattaatatttaaacatattagaataatacatgttcataatgaaaatgaaacattacaaataaatacaaggaaaggcagtattccccctccagttccactattgaaataaccagttaacaagatgatgagcatctttccacgatgttctccaagattcatataagtattggccagcaaacaacagaatatacaggccagtcttggtggctcatgcctgtaatcccagcactttgggagactgaagcaggtggatcttttgaggttaggagttcgagactaacctggccaacatggtgaaaccccatcgctacaaaaaatacaaaaattatttgggcacggtggcgagcgccttaatcccagctacttgggaggcggaggcatgagaatctcttgaacctgggaggagacgtttgcagtgagccaatattgcattaatgcaccccaacctggatgatagactgagattccatctcaataaataagtaaatacataaaataaagagaaaaaaagaaagatgaaagaaagaaaaagaaagaaagaaagaagaaagaaagaaagagaaagaaagaaagagaaagaaagagaaagaaaggaagaaagaaagaaaaagagagaagtaatgtgctcagtttgctaacatcgatagtaagaacaaatcctctagcggtgaaaatgtaagaaggaaaaagaaatttctgttagtcttgtttattgcactgcaagctctaaaaagtacagccaagtgtgtgataagtgcttagttaagatgaaaaaggcattaaatttgtgcgtggaaatcataaacagaaatgtgttctgattgacagcaattgggtcaatgctacccaagtttcaggcatccactgagggtcttagaacacatctcctgcagataagggagggctactatgtaacgtttctttcttttttctttaattataaagcattctccttttttaatataacaattggccacatatgtcactttagatataaagatattaggatatctttatagtagataaaaagctaactcgttctttgtaagagttaaagtatctttcattatatgagcatttaagatattaaagtactcttgccaccaaaaatagtgcttctataaatattcttttacttatatctttatttttacttctgctgaaacaaattgcatgaggaaacaagtgtatgtgtataaagtgtaatatatgtgtatatatttaatatgtgtatatgcaacttaatatatacacaacatacaataacatatacaacttttttgttttgttttttgagatggagttttgctctctcatccaggctggagtgcggtggcatgatctcggctgactgcaacttccgctgcttggttcaagtaattctcctgcctcagcctcctgagtagctgggaatacaggcatctgccaccatgtccagctaactttgcttttttagtggagatgggttttcaccatgttggccaggctgctctcaaactcctgacctcaagtgatccgcccaccttggcctcccaaaatgctggaattacaggcgtgagcctccgtgcccagcctaacatatacaatttaatgtatatacaaatataggttgggtgcagtggctcactcctgtaatcctagcacaatggggagctgaggtaggggattgtttgaacccaggagtttgaaatcagcctgggcaacatggtgaaacactatctgcacaaaaaacgcaaaaattagctgggtgtacttgcaggtgcctgtggtcccaggtactcaggagactgagtgggaggatagctggaacctgggtagtcgaggctgcagtgagctgtgatcatgccactgcatctgagtgtgggtgacagagtgagaccctgtctcagacaaaaacaaaaacaaaccaaatataatgtgtatgtgctacacacttgatttctttccaaagggttatataacactctactttcaccagcaatatatgtgactactcatttcctacatactatcacttgtatgcagtcgaggaaacttagtaggcctgaattgcccaaacctggcatactccaaagaaaggtttgactctatcctagctcccaggaaataacctctaagtccttggaatctcctgcctatctgggagttaacaacgtgatttattatggggaacttggaccatgcagtgtcagcttgaccttgggaagggtggagacagagaaactaaggccatccaaatgggtgctcttgtccatgtgaccaacctccagtaaaaccctcaaccccaaggctcaggtaagcttcttgttggggagtatattctatactttttgccacatatcgctgggtgaattaagcaccgtccacacgatgtcactgggagaggaaaactggaagcttgtgctttgtctctcctggactctgccctatgcacctttttctgctgctgattttcatctgtatctttttgttgtaataaactatgagtataacagcttcactcggttttgtgagtctttctaattaatcactaaacctttgggacctcagaacacaatgttgtttcttctttaattgaattttccatgttatgtaagaaacctatgtgcataattgaaaaattacaaactaagaaagagctttccatgcagtctactcccccaacctgtttctccaatgctcccaggtctacttcctgaataatcaaatgtttaaattttctaaactatttctaatctacatatctgagtgcttgtctctatattatataataggtagatcctgcttcttctcaatatatcaacttgatatattacctgatggcttcctgttctgatagctgatgacttggctgacactggccctttactccagtgcctggaccacttttcaaacatggtgctctcaccattttatttttcttttcttttcttttttttttttttgaggcagaatattgctctgtcacccaggctagagtgcagtggcatgatctgggctcactgcaacctccacctcccagattcaagtgattcttctgcctcagcctctggagtagctgggattacagggacatgccaccacacctcgctaatttttgtatttttagtagagacggggtttcaccctctcagccaggttggtcttcaatgcctgacctcatgatccacccatctcagcctctcaaagtgctgggaccgcactcggccactctcactattttcaatggctctcttggtcacctttcacttgggagagtagctgaggcaggagaatcacttgaacccaggaggtggaggttgcaatgagttgagatggtgccattgcattgcagcctgggcaacaggagtgaaactctgtcaaataaataaataaataaataaataaataaataaataaaacagaaaaggaaaaaaaagaagctctccctccatatacctgtaaggatcattgtcttaattttcttcatgtcttaacatgattcttgccttgtcagagatcatcctatctgaaattgaaactatttaccacttccctattttttccatggcacttaaaactttttttttttttgagatggagtctcgctctgtcacccaggctggagtgcatcggtgtgatctcggctcactgcaacctccgccccaaaggttcaagtgattctcctgccttagcctcccaagtagctgggattacagtcatctgccaccacgcctggctaacattttttttttttttttgtattttagtagagacggggtttcaccatgttggccaggctgttcttgaactccttacctcaggtgatccaaaccacctcggactcccaaagtgttgggattacaggggtgagccaccacacccagccctggctaatttttgtatttttagtggagacagggtttcaccatattggctaggctgatctcgaacccctgacctcaagtgatctccctgccttggcctcccaaagtgttgggattacaggcatgagccactgtgcccggactgccttttgacaaatcatctctgttcttatattatgtccactagaatgtaaacttgatgagagcaggagatattgtgaattttgttcaatgctatttatccctagagcttagaactgtaccatgtacacagtaaggagacaaatatttgttgaatgaatatattgagcagcttttctcagactttttggtttcagaaattctttactctctgtttctttactcccgacctcaggtgatctgcccaccttggcttcccaaagtgcaaggattataggagtgagccaaaacacccagccactctactaatttttgtatggtagtaagcacggggttttgacatgttggccaggctgatcttgaactcctgacctcaagtgacccccacctcagcctccaaaagtgctgagattacaggcgtgagccactgcacccgactaaagaaaccaaaaactttagataagtgaatttggaggaaatatttataacaagataattctaatttactgtctctctggcttaataaaatattagtcaataccctaagaagaaaggaacaaaatctaaaaattcaccattcacaaacacaaatagtcggaaaacaaggtcaaaaccaaagaacttgttgaccaattatctctcctctgaaatcagctcttgaatgtgttgaactaggattgatctcggattaggaaatttttaaaatattttttaaagtttcactatttggaatttaaaattaatccaaattatgtaatatacaacatttggaatttaccaatcaatactctatcattttatttttcactcttcaaataatttcttgttcaagagtttaaaacgcttttaaaattaatagattctgcaggctatggtctgtagagactgtctctacaaaaaataacaatatatatacttttaaaatatatataaaatatatatgtatttaaatgtatatggttcaagtatataaaacatatttttaaaatttcatttttcactggattgtatggtaagcgtatgtttagtctggcaggaacttgcaaaactgccttccacagtggctgtcccactttgcattctcagcagaaatagagatgagttcctgtcgctccatatcttcaccagcatttggtgttggtgtttgcattcaaggcagtctaagagatgtgtaatggtatcacatcgttgtttcaccctagtgacatatggtgttgagcatcttttcagaggtctatgaaatgtgctgggcatggtggcacatgcctgtggtcccggctactcaggaggctgaggcgggagggttacttgagacctggagtttggggctgcattgagccatgattgcaccactgcactccagcctgagtgacagagctaaaccctgtctcaaaaagataaataaggccaggcgcagtggctcatgtctgtaatccaagcaccttggaaggccaaggcgggtggatcacgaggtcagcagatcaagaccatcctggctgacacagtgaaaccccatctcaactaaaaatacaaaaaattagccaggcatggtggctggtgcctgtaatcccaactactcaggaggctgaagcaggagaatcacttgaacccgggaggtggaggttgccatgagccgagattgggccattgcactccagcctgggtgacagagtgagactccatctcaataaataaaaataaataaataaataaataaataaataactgacaatttttagaacagttgtaggtgtacagaaaaatagagcagaaggcatattgagctctaatattcacctcacaccatagtacacacgcttcctctattatcatcttgttagtgtggtaatttgttatgcttgatgagccaatattgatattattaagttcatggctaatattaagattcactctctgtgttctaccatttatgggcttcgacaaatgcataaggacatatatccaccattatagggtcacacagaaaagtttcactgccctaaaaatcttctgtgctccacctatttatctttccctctgctcaagcctctggcaaccactgaactttttataataccatctgcctagttttgccttttctagtattccatatagttggaaatctatactatgtggcctttttgtattggcttctttcacttagaaatacatgtttaagattcctccatgtcttttcatgctttggtagttcatttctttttattcctgaagaatattcctttgtatgaatgtttcagaattagtttatccatttctctattgtaggatatcttggttacttccaatctttgtcagttgtgtataagctgctgtaaacattcatgtgcaggatttgagtggatataagttttcaaataccaaagaatgcaattgccagattgtatttaaacatacaaggatgcagatgccatacacacaaatatgtatgtatatgtcatgctcatatacaattttaaatacatatatgtgttctatggatatataagtatttctctactttcacagaaatgtcactctaaatcagtacctaggaagggtcatcattttcttaatctacaaatcaagacatgatatgagtggctgcatccttgtttagtacgtcctctattattgaggatgttttcctgtttcctttttcattgctgttgttttgttttgagacaagtttcactcttttgagtcaagtgatgtgatctcagctcactgtagcctcctgagtagctggaattataggtgcccaccaccacacccagctaatttttgtatttttagtagagacggggctttaccatgttggccaggctggtcttagctcctgaccgcaggtgatccgtccacctcaacctctcaaaatcctgagattacaggcgtgagccaccatgcttagctcctttcatcatttcaaactgagcttggagaagaacctgaggaaaaacatgactttaaaattttgatgaatggagaaatctctttccattcaccttcctttcctctatttcattcttattttaaaatatacaaacaaagatatggatacatcagttattaaataaacatctgtgtgatacctatccaggtgaagaaatagaggactatcaccaccgagaagtcctctgtatgcacctaactgatcctaaagtcttccttccccttattagtaacagatataagagatatccacattacctgtggatatctgccatcctctccttggttctctttataattttattatgtattttatatcattttttttttttttttggagacagagcctcgctctgtcacccaggctggagtatagtggcatgatcttggctcacggcaacctctgcctcccagattcaagtgattctcatgtctcaaccttccaagtagctgggattacaggcatggcccatgtgccaccatgcctggataatttttgtgtttgtagtagagatggggttttgcatgtttgtcaggctggtttagaactcctgacctcagtgcctggccttattatgcattttttatatgcctaaagtaaagtctgattttgcctggtttttctcttacataattggagtaaaagtctgtatcctggtgcatctggccccttttactcaatattaagtatttaagattcacacttaacattgtttcttcattctattaaaacagtacaccagccagccatgatggctcgtgcctataatcccagcactttgggaggctgaggcaggcagatcacttgagttcaggagttccagaccaccctagccaacatgatgaaactccatctctattaaaactacaaaaattaggccacgtggtggccaatgtctgtcatctcagcactttgggaggccaaggcaggtggatcattaagtcaggagatagagacaatcctggcgaacacagtgaaaccacatctcttctaaaaatacaaaaaattagccaggtgtggtggcacatgcctgtagtctcagctactctggaggctgaggctggagaatcacttgtatctgggaggcagaggttgcagtgagccaagtttgcaccactgcactccagcctgggtgacagaactagactctgttaaaaaaaaaaaaaattagccagatgtggtggtgtgcgcctgtaatcccaattatttgacaggctaaggcaggagaatcagttgaacctgggaggtggtggaggttgcagtgagccaagatctcaccctgtactccaactggggcaatagagtgacagtctcaaaaaaaaaaaaaaaaaaaacagcccaggcgcagcgcctgccacctgtaatcccagcactttgggaatccgagataggtggatcacctcacgacaggagtttgagaccggccttaccaacaaggtgaaaccccatctctactagaaataaaaaaatttaccgggagtggcggcatgcgcctgtaatcccagctactggggaggctgagacaggagaattccttgaacccaggaggtggagattgcagtgagccaagatcgcaccactgcactccaacctgggcaactaagcaagactctgtctcaaaaaatatatataaatttatatttatatatataaaataaatataaaaaataaaaataaataaaactacagtacaccagtgtgtatcccttcattgttggtggacatgtaggttgtgttcacttttgtcagttacaaatgatgttgttgtgaacatgtttgtatttctatttggttaccattagtgtgtatttatgtacagtataaagcaagaggtgaaaccataggttacagggtaaacttatcttcagttttactaggtattattcgtttcattccaatgttaacacaccaactgacagtcttacaatgtgataattctcaaatcttcgcattcttcttgacacttaattttgtcaaaattttaatttgagtcttttggtgggtatgtggcaatgattgtgatattaatttactgggccttttcttctctgtaacaggccctggcaagatatatgtgtggtgtggcaggggtaggagcccctagaggtagcatgggctctggaatccttaatcatcctatgtgaaaaagttggtggggcagtgaatatatatatatatatttttttttttttttgagacagagttttgctcttgttgcccaggctggagtgcaatggcactatctcagctcactgcaacctctgcctcccaagttcaagtgattctcctgcctcagcctcccaagtagctgggattagaagcatgtgccaccacacccagctaattttttgtatttagtacagatggggtttcaccatgtttgtcaggctggtcttgaacagctgacctcaggtgatccacctgcctcagcctcctaaagtgctgggattacaggcatgcaccactgcaccctaatatttcctgtgtgcaatggtgtagccagggtgcaaagccagttcttaatgattctgtcatccaaatattatatcttcttgcttccccttgagatatgctcattcctccgtacaattaaacaatctcaattactcttgaaagagcataaaatcctccctgtcatgggtccttccaaattatttgttggcttgtgtttaaaatataaaaaagagaatgtagattttgttttcttctttctgcttaacctgaacaaaatgtcataggtacctcctagcctgttggtaaatcgagagtcacttgaataatgaacaagagtggagggaaaccacatggataatttatcattacactatcatcacatacatggaactcattaatgaagtttacaaaaaaaaattgagtcatttgtggaaaagtgtaaagagaatataggagatgtctcaagtgaagagaaaaaagctgcagaaaataattacaaaaaaagagtgttaagatgtaaacacaaattcagagattcaggagcatgaagggctaagttaagggaaaaaagagttatcaatattttcttattcattttggagagcaggatgaattcttaaaaggtcaaataattgtgagtctgatatatctgatgataatttgtattttgtatttctaatgttgtaaatggttgttaatttacagtcattatttctatttcctttagactagtgaccatgagtttgactgacaataacccattgggttagtattgttatctacgtgtgttcatcatgctatgtgttaaaacaagtccatcaatttttgtcttgtgtttgttttcatttaattttagtttagtttctttgggacagggtctcactgtcacccaggctggaagtgcggtggcatgatcacagctcactgcagcctctacatctccaggctcaggtgatcctcctacctcagcctcccaagtagcagggactacagacatgagccaccacacagtggctaatttttgtattttttgtagagacagtgttttgatatgttgctcaggctggtctcaaactcttggactcaagtgatctgcccaccttggcctcccaaattgctgggaggactggcatgtaccactgtcccggcctgttttcattttattaattggctgattcattcagacacataattatcaagtcaaatctcactctttctttagcatttcccttcagtttagctgagaaaatctattcttattttaaaacatatacaattattcaagtgtggtggcacacgtctgtaatcccagctactcaggaggctgaggcaggagtatcacttgaacccgggagtgatatagtgattatatgtagtatataactatatagtgattatagtttataattttaactatatcatgtctcctgcctcataagtaccactggacaaggtcccttttatgtattcagcttctgtcagaggtaaatgtattttgaagtggagaacaaagataagtgcaaaattggcatggagaactaacgtaattatgaaagttccagatacaaagagagagggctcaatatgccagcagttctctaccaatccatcctagcggtcttcttttaggattgcctaaataattcaggagataagtgcaagacacacaagtgttccagaagcatgtaaacaaggtacagagaagaggataagataaagtaagataagaatattaggaatgtcttgttcagaagattgcctacagaggcaaaagggacagtttcattttgctgagggaaacagggtggtaagaacactcctggggaagacccccacttaccctgatacagaaagaaggtgtaaaataacgtaatgggagagcattaggctgagatagctcccatggccagggttcctacatagaaaaaatgaaacaagcttagcccatcaacaagtggcccgctgagtattagctgtgtaatgagagacctaccaccaggatagttcaaataatgcaactgcccaaatttttgccaatcaaataatttctctaccctacttctatattcaccctataaaagccttccttacaaacacctccagtagatcctccaaccactttcagtttggagctgcctgatccatgaatctctgtttgctcaaataaactctttaaaattttaatgtgcttaagtttatcaattttttttctcatttttaaaaattgagatgggatcttcctatgttgtccaggctggtcttaaactcctgaactcaaggaatcctcctgcctcagcctcctgagtagctggaattatagacgtgtgcctccacacccagcttacatttatctttaaacaagggtttgacccctttctgaaatatatttctctgaagacctgtaccctcagtgatatgggaggctcattttagaccattgggcacttttgtctccggaccacaatttgccctttgtgacctgctctactaagaaattcaagtgtaattcaaattagtttaccatctgctgatcaggggagattgctctgggtgcaagttcaagacaggcactcacatcttcattcgtaccccaaatctcagcatcacacaatacatccatgtaataaacctgcacaggtaccctccagaatctaaaatgaaagttgaaattcattaaaattttaatttcatcttattacaaaacaaagatacatttacttctttccaattttgatatatattatactgacatacacactgtattctatggtgaattatactgattgaatttcacattttgaactaacactgaattactttgaaaaactctactgggtcataatgtattatgtttttaatatattttaatacaatttgcaaaaattctgttttaaaattacctctctgttccataaataaataaatatgtaaaaaaaataaatgtttgtattattcaagtgaagattatagcaataattttgaatatctacttaacctcaactagttttaattcagaagtagcaactccataaaaattcaacttattactaccttattactcatacttgtctccttgaagaagttcattgttatcatccagtttagactgggatgtcataaatctctagactgagtagtataatattcactgttcaaaaaaaatcaaattattattataatgttatgacacctccaaatacaaaaagcaagcccatggatgtcaggttaaggtatagaggcaagtattcctacttactatcttttagggcagacatatcccagccaagctgattgcaaaatgaaatggaaaccatatggtggaaggggacttgggactcacacagattggattttcattccaacccttacatacacaagctgcatgactctgggtagattgcatattctcttagagtttcaatttcctcatctgtgcaatgacacttaatgcctatgggctatggctgatgtggggataaaagaaccaacacggatgcatgggcagggcctggtccatagggcagctggcatcaacaaatggaagccccttcccatcttgtctttgcatgtactacaaaatccggaatatgtgggtataaaaagtactcttaaaagagacataattggaagcttttgcaaaaagagattggaaaggtgtcacatcttgtagcatgaggagttgtgggcatacagttgaactttgtgctgtgagatatccacagaacttcagtagtttaagagaacagtttagatatcatcttattcatctaccatagaacttcctcctcttttctgagatttctagacagtaacttttacagctctaataatgcagttctctcccaattgtttggactattctaatagacacaaagcagtatttcaccagcagatgctactgcagtttctatgatgatttcaaactgagaatccatttaaacttatgcaatactttttttggaaatagggtgaaagtattttaagtttaaaatcctataaaataggtttacagtaaataattacttgttgcaatatctatcatactatcttatattcacacatgtattggagtcctaatacatatgtatgagagtgaaagttacctgaggtcagagactgtgccatatgttccctgcaccactggtgcctatctcagcacatgatatacagtagatgctcaataaatactttccctaaaaagcgcactaagaataaatttgattagacatcaaaatacatatgagtacaatctagggacatggtcaggagctcaaaattcaatcttatttattttttatttggagacagaatctcactctgttgctcaggctggagttcagtggcatgatctcagcttactgcaaccttcctttcctgggttcaagtgattcccctgcctcagcctccagattagctgggattacaggtgcacaccaacacgcccagctaatttttttgtatttttagtagacacagggtttcaccatattggccaggctggtctcaaactcctgagctcaagcaatctgtccaccttggtctcccaaaatgctgggattacatgtgtcagccaccatgcacaaccacaaaatgttttaaagtagcttcaaaacccctttgcaaataggtgtattcataacaagatgcaaacaagaaaacattgagcttcatataatagaagggttctgcctggatttgcatgtggccccatcatttgtttgctgttgggccatggtcatgttacttagctgctctctgcctccacataggttttaggcctgtgcatccctcatctacaaaatgggaataataagaatatctgacaattagacgtgtagaaaatatatgtaaaggcctttgaaaagagcttgtgaaagctcaataattgtccccaataattgctctcaataattgtcagctatcattccataataagcgtaatcataaaaatgtttgactcaaagaaagattccgacttcatatccagcttcccaaaagaatatcagacataggacctgtgaaaggaatgacattgagatgtattttcacatcgctaagttggttttttctctttgtcattcaatttctgcagtccctactctaagcccatggtccacctttttatttttcctcctaaaatgtcttcccttctcataagatttacttttcctaaaaagggcccttttcatccacccactcttttgcccttcccagaagttggttaatggggacaaaaatacagttagatggaaggaacagaatttctagtgttcaaaagcacagtagggtgatgatcattaacaataacttatatatttcaaaatgactagaggaaagatgtggaatgttctcaacacaaataaatgataaatgtttaagttgatggatatgcacattatcctgatttgatgactacacattgtatgcatgtatcaaaatatcacatgtaccctagaaatatgtataattgtcatgtatcaataaaaataaaaaggcctatttctctttccttcctccccgtatttcctacaaagtggattttagtaacaatcttgagtcatcacagaagctaatgaagttggggattccacgaatccatccaagcatataaagcccatttcccggggtcccttttccttagctcaaggccacaaaaaatcagaacttgaattccagcccacatttgccttatgtctacataattatgagttgtaaatgaagctaacaattagttaaatatgttctattctcctactttgataaatatacacccataataacccacaaggtcaaagtcgagtgtagaattctctgatttcttggtgctctgcacaggattgtggtagtaaagggagagccgatcctcagccccaggctaaacttttttctttcatcgtaggtagccctgtcctcacttgagaagctttgcatacccctgtgtgggggactccctaggccccgtgcaagctccatccacaattctcaccccattcagacagcagaaagcctctggtgcacaagggggcaccatttggacaagcagtttgcgctttgaaatgaacctagggaagaggccatgcaggctcaggcacatttcatcaggggcctgagtgcccagcgtgtgccctagaagagagggtgaagctctgggtgggccagggtacagtcagtggagggccagagaggcaccttctcaagtacaggattcagggcaggggtcctcttgcccagatcgatggctaccattgcttagtgcaatggcgcctgcgtcatgtcttctcagctcacctttcattcagtctcagccaccgtgggaagttccactgaagcgcaggcttcccttgtgctgccagcaaactcaagctccactttctgccctagggcatctccattattgtaggattttgtctgagcataaatacagcccagaaacacttgcaagttaacagcctcaggggaagacctcaaccagtgtgggacaggtggacaaatgctccaggctcatgtttcaggtgaacagttctggataactttccggaacctcttggaaggtcctgaagaaaaaacaccatggcaggagcctcaataacatgccattattttggtttttctttctttcctggctcactcttcccacttctgactcttgcttcttggaatcacttcccaaataaaccacccacacccaagtccttactccagctctgcttctagggatacaggcacaccttggagatattgcaggtttggttctaggtaaccacaataaggggaatatcacaacagcgcaagtcacacgaaactttttgcaagtcacacgaaatgttttgctttctggtgtatataaaagttatgttgccaggcatggtggctcacgcctgtaatcacagcacattgggaggccgaggcgggtgcatcacctgaggtcagaatttcgagaccagcctggccaacatggtgaaaccctgtgtctaccggaaatacaaaaatggtggtgcactcctgtagtcccagctactcaggaggctgaggcaggagaattgtttgaacctgggaggcagagtttgcagtaagccaagatcgcaccactgcactccaacctgggcaacagagccagatgccatctcaaaaaaagaagttatgtttaagctactgtaatcaattaagtgtgcaatagcattatgtctaaaatataatgtatataccttactttgaaaatacgtgattgccaaaaaatgctaaccatcatctaggccttcagcaagtcatcaccattttgctgctggatggttttgtctcaatgttgatagctactgactgatccgggtggtggttgctgagggctggagagggagtgacaaatttcttaaaagaagatgacaatgaagtttacttcattgactgactcttcctttcacaaaagatttcactgtagcatgctatgcagtttggtagcattttacccacagtagaatttatatcaaaattggaaccaatcctctctaaccctgccactcctctatcaactaagtttataattattatataagcaaaaatgatatcccttggtttttaaagataatacaaagtggattttagtaacaatcttgagctgtcacagaagctaaagaagttggggattccatgaagccatccaagcatataaagcccatttccctgggtccgttttccttagctcaaggccacaaaaagtcagaacgtgaattccagcccacatttgcagtatgtctaaataattatgagttataaatgaagctaacaaatagttaaatatgttctattctcctactttgataaatatactgtcataataacccacaaggtcgaagttgagtttagaattctctgattccttggtgctctgcacgggaatgtggtagtaaagggagagccgatcctgagccccaggctaaacttttttccatctaattccatttatttccattaagattgcagcaatttggccgggcgcggtggttcatgcctgtaatcccggcactttggaaggccgaggtggaaggatcatctgcggttgggagtaccagtccaccctaaccaacgtggtgaaacatcgtgtctactaaaaatacaaaatcggccggatgcggtagcacatgcctataatggcagctactcaggaggctgaggcaggagaatcacttgaacccagtaggcggaggttgtggtgagccgagatcgcgccattgcactccagccttggcaacaaaacaaaactccatctcaaaaaaaaaaaaaaaaaaaaaaaagattgcagcaattcactcacgtcttcaggttccacttgtaattctagttctcttgctatcttcaccacaactgtggttgcttcctctgctaaggtcttgaacctctcaaagtcatctatgagggttggaatcaacttcttccaaactcctattaatgctgctatttttacctcctctggtgaatcttgaatgttcttagtggcatctgtcatagtgaatcctttccagaaggtttccaattgactttgcccagatccatcaaaggaatcatgacctatggcagtaacagccttataaaatatatttctcaaataataagactagaaagtcaaaatgatgcctcagtccatggactacagaatagatgttgtgttggcaggcatgaaaccagcatgcgtttccctgtacatctccattagagctctttagtcaccaggtacattgtcaaaaagctgaagtatttgaaatgaatctttttttctgagctgtaggtctcaaaagtgggattaaaatactcagtaacccatgccgtaaacagctctgatatcatccaagtgttgttgttccatttatacagcatgggtagagtagatttagcataattcttttttattttttcttttattattattatactttaagttttagggtacatgtgcacaatgtgcaggttagttacatatgtatacatgtgccatgctggtgtgctgcacccattaactcgtcatttagtattaggtatatctcctaaaggtatccctcacccctctccccaccccacaacagtccccagagtgtgatgttccccttcctgtgtccatgtgttctctttgttcaattcccaagtatgagtgagaatatgcggtgtttggtattttgttcttgctatagtttactgagaatgatgatttccaatttcatccatgtccctacaaaggacatgaactcatcattttttatggctgcatagtattccatggtgtatatgtgccacattttcttaatccagtctatcatttttggacatttgggttggttccaagtctttgctattgtgaatagtgccacaataaacatacgtgtgcatgtgtctttatagcagcatgatttatagtcctttgggtatatacccagtaatgggatggctgggtcaaatggtatttctagttctagatccttgaggaatggctacagtgtcttccacaatggttgaacaggtttacagtcccatcatagtgtaaaagtgttcctattcctccacatcctctccagcacctgctgtttcctgactttttaatgatcgcccttctaactggtgtgagatggtatctcattgtggttttgatttgcatttctctgatggccagtgatgatgagcattttttcatgtgttttttggctgcataaatgtcttcttttgagaagtgtctgttcatgtcctttgcccactttttgatggggttgtttgtttttttcttgtaaatttgtttgagttcattgtagattctggatgttagcccttagtcagatgagtaggttgcaaaaattttctcccattttgtaggttgcctgttcactctgatggtattttcttttgctgtgcagaagccctttagtttaattagatcccatttgtcaatttttgcttttgttgccattgcttttggtattttagacatgaagtcctttcccatgcctatgtcctgaattgtaaagcctaggttttcttctagagtttttatggttttaggtctaacatttaagtctttaatccatctttaattaatttttgtataaggtgtaaggaagggatccagtttcagccttctacatatggctagccagctttcccagcaccatttgttaaatagggaatcctttccccattgcttgttttcctcaaagatcagatagttgtagatacgcggcgatatttctgagggctctgttctgttccattgatctatatctgttttggtacaagtaccatgctgttttggttactgtagccttgtagtatagtttgaagtcaggttagcatgatgcctcccgctttgttcttttggcttaggattgacttggtgatgcgggctcctttttggttccatataaactttaaagttgttttttccaattctgtgaagaaagtcattggtagcttgatggggatggcattgagtctgtaaattaccttgggcagtatggcccttttcacaatattgattcttcctacccatgagcatggaatgttcttccatttgtttgtatcatcttttatttcattgagcagtggtttgtagctctcattgaagaaccaaatgccttcacgtcccttgtaagttggattcctaggtatttgcttctctttgaagcaattgtgaatgggagttcactcatgatttggctctctgtttgtctgttattggtgtataagaatgcttgtgatttttgtacattgattttgtatcctgagagtttgctgaagttgcttatcagcttaaggaggttttgggctgagactatggggttttctagatacacaatcttgtcatctgcaaacagggacaatttgacttcctcttttcctaattgaataccctttatttccttctccttcctaattgccctggccagaacttccaacactttgttgaataggagtggtgagagaggacatcactgtcttgtgccagttttcaaagggaatgcttccagtctttgccaattcagtatgatattggctgtgggtttgtcatagatagctcttattattttgagatatgtccattcaatacctaatttattgagagttttttgcatgaatagttgttgaattttttcaaaggccttttctgcatctattgagataatcatatggtttttgtttttggttctgtttatatgctggattaattcttaagaggtgccctaggatttatggaatagcaaatgtgcattggcttgtaacaagaaagtcagcctgtcctttaaatcctttttttattttatataaagtctcactccattacccaggctggattgcagtggcatgatcttggaccactccatacttgacctccttggctccacaatcctcccacctcagcctcctgagtagctgggactagtagcatgcaccaccatacatggcttattttcatttatttatttatttatttatttatttattttttgttagagacagggtttcaccatgttgcccaggctggtctcaagctcctaagctcaagccattctcccacttcagcctcacagagtgctgggattacaggtgtgatccaccgtgtctggcctctaaattcgtgttatggagactccttttcatggttaaaatgtcctgaattgactgtggcctgttgggagtcgggatggaggaaattacttatggaaaatgaagaagaaagggaagcacaccagaagaatatgtcatcaatttttacatcaaggactccaagataaagagaaagtacaggtggcctgttatcatggctgaccattggactgtggactgcacctgaatctaccaggttcttctgggtagtcccagtattaaatttttgacctgataatcatgaacacagtgctactggtcagacctttgtccaggtttaagcttcagaacataatgtcttcatgcagtgggaggcctgattagcgttatgattctgccctggggcatctgccccttctgacatggaggtaaacttggcatctgctacttacctctacacttgaacaggcaaggatgggctgagcacagaggctcacatctgtaactccagcactttgggaagtcaaggcaggaggatcgcttaaggccaggagttcaagaccagcctgggcagtatagtgagacctcatctctgtaaaaacaaacaaacaaaaccgaggatgggtgggtgacagggagcagttcaacatgggaaaccattaatctgagagctggaaggacccttagaccatccccccattaacagatgagactctgccctgagattatagcctaaagcaatgcattgagcttttctagagatttgaaaataatcaatcctaaaacccccaagcatactgctactgtttgctgttggataatgttttctagtctgggtgtggtggctcctgcctgtaaacccaacacttttgaaggtcgaggcaagtggatcacctgaggtcaggagttcgaaaccagcctggccaacatggtgaatccacgtctctacaaaaatacaaaaaattagcaggccatcgtggtgtgtgccagtaatcccagctgcttgggaggctgaggcaggagaatcctttgaacatgggaggcagacattgcagtgagccgagatcacaccatcgcactccagcctgggctacaagagtcaaattccatctcaaaaataataatgataataataatgttttctacaagcaaggagttacttagtactgtgaaccggtgtgaagggatttgccatgtgtcagcttttggattcatgacagttatttctagataacagaggtgggaatgtttgttgatcatcttctatgttctttgttatattgattgattttttaaaattagcatttttataacaataaagtcataaaaataagtaactaaaataaagtaaagtaatctaaaaaggctgagtgtggtggctcatgcctatagtcccagcactttgggaggccaagatgggtggatcccctgaggtcaggagttcgagaccagcctgaccaacatggtgaaaccccatctctactgaaaatacaaaacttagccagacgtggtggcagacacttgtaatcccagctactccagaggctgaggcaggagaattgcttgaaccaaggagaaggtgcttgcagtgagctgagattgtgccattgcactccagcctgggtgacaagagctaaactccatctcaaaacaaaacagaacaaaaatctaaatgtaattgagttgaatatttaaacttttaattgacatttcatattagattctaattccatttaaaagagcatctcgtagaagcaaatgaactcaattatattaactctgtggtttcatttaagcaatttgttttgtgaagggacacaaatccaaccagattttaacggtgtataaatatgtatttattaatttaattactacgacagtactctcaactccccatttgaataaaggagagcatcggatctgtgttctgggacagcgtgcactataggtgtgtggaaataccgatgccctcagctgtgtggcaggctcagtgggacctggagtgcaggagcccctgggccattcacctctggccacaaaagtcattgtccatttaccccaaactgctatagaaagattattttcagtggctgttatgatgcaaaagaaaagaagcagggagatttattaaacttttacatataagatatgttagtaaataaagtctactttcttctggcttaactaaaaatctatactagtatttatgccttttggaacttagagatgccaatttaaaaattaggaagcaaaacaactgagtattggataagacagccaagtacaactgcagaattgtagaggttatgggttacatgtataagaatatttcatagcaataatcttttaagactctgtgaagacactccacagtgaagcagaaattagaacagaattaataatactgtgtatgctctcagttcaccaattatttatcaaaactagctttatgatacaggagggtgtctgctcttttgcagttggaagaaaagaaagaatattttatttttttgagtctttagattttcttcactaacagtatttccaaggctaagtaagggggttgcaagtaacaccaagagaaaaaagcagtcttgagcaactttttaaaaatggtcttaaaatatggaaaatggagccaggtgtggtggctcactcttgtgatcccagcactatgggaacctgaggggggaggattgcttgaggccaaaagtttgagaccagcctgggcagcatagcaagatctccatcattgcaaaaaataatatttttttaaaaaattagctggatgtggtggtgcatgccttagagtcccagttacttggaaggctgaggtaggaggagctcttgagtccaggagttcaagtgtgaagtaaactgtgattgcaccactgtcctcaagcctgggcaacaaagtgagacctctctctctctctctctctctagatatatatatatggaaaagagaaggtccaagaatatcaaagacattgaagaagaggaaagatttgtcctgccaaatatcagaacttttataaagctacagcaattaagacagtgtggtcctcactgataaactgactaatgaaacagaatagagagctcccaagcaaatctctacaaatttaatcttcgatacgtgatgtaggtgacatggcagatcagtaaggaaagaaaggacttttcaataaatagaatagaaaaataatggttattgatataagaaacaaaatgaaattatattcctacttcactctatatacaaacattaaattccagaggaccaaagacttacatgtcagaaacaaaactttaaaacttttagtagaaaatgtaagtgaatgggacacaaaaagccatttaaccattaaaaaagattagacattttgactatcacaaaattaagaactttttacatcaaaaagtggaaagataggctggtcacagtgtctcaatcctgtaatcccaatagtatatcacctgaggtcaggagtttgagagcaggctggccaacatggtgaaaccccatctctactaaaaatacaagaaattagctgggcatcagtggcagacacctgtagtccaagctacttgggaagctgaggcatgagaatcatctcaacccaggaggtggaggttgcagtgagccactgcactccagcctgaatgacagagccagactctgtctcaaaaacaaaaaaattgaaattaaaaaataaaagtaaaaaagtcaaaagataaactataaattagagaagatatttgcagtacctaaaacctatgaaagattaatatcatatcaactaagcataaggagctcctatgaattaattttaaaaatagcaacccaacagaaaattgggaaaagacattaatagggatttcacaaaagagaaagcttgcaaaacataaaaattttctcaacctcattagtaatcagggaaatgcacaagatactacacacctattctctccacaaatattaagaagtttgacaataccaaatgtattagtccatattcacactgctgataaagacatacccgagacagggaagaaaaagaggcttaaatggattaagggttccacatagctgaggaggcctcagagttatggcggtggatgaacagcacttcttacatggcagtggcaagagaatatgagaaggaggcaaaagaagcaaaagacgaaaccactaacccatcagatcttgtgagatttattcactatcacaagaatagcatgggaaagaccagccccaaagattcaactacctccccctgattccctccccgaacacatgggaatcctgagcagtacaattcaagttgagatgtgggtagggacatagtcaaaccatattattctgctcctggcccctccaaatctcatgtcctcacacttcaaatccgatcatgccttcccaacagtcccccaaagtcttaactcatttcagcattaacccaaatgtcccctgtccaaagtctcatctgagacaaggcaagtctcttctgcctatgaccctgtaaaatccaaatcaagctagttacttcctagatacaatcggggtacaggtaattgagtaaatacagctgttccaaatgggagtaattggccaaaaaaaaggggttacaggccccatgcaagtccaaaatccagcaaggtaatcaaattttaaagctccaaaatgatctcctttgactccctgtttcacatcatggtcatgctgatacaagaggtgggctcccacagccttgtgtagttctgcccctgtggctttgtagggtatagtccacctcgtggctgttttcatggactgatgttgagtgtccatagcttttccaggctcatggtgcaagctgtcagtgaatctaccattctggggtctggaggagagtggccctctcctcacagctccactaggaagttccccagtaaggactctgtagagaggctctgaccccacatttctcttctgcagagccctagcagaggttctccatcagagcaccacccctgcagcaaacttctgcttggatatccagatgttttcaaacatcctctgaaatctaggtggaggtttccaaacctcaattcttgacttctatgcatgtgcaggctgaacacaacgtggaagctgccaaggcttggtgtttgcactctcaaggccatggcctgagttctatgttggcccctttcagccatggctggaggggctgaaacgcagagaaacaaggccctaggctacacacagcacagtgaacctggcccagcccagaaatccattttatcctcctaggccccgggcttgtgatgggaggggctgctgtgatgacctatgacatgtcctgtagacattttccccattgtttttgggattaacattcagcttcttgttacttatgcaaatttctgcagacaccttgaatttatcctcagaaaatgggattttcttctctatcacattgtcaggctgcaaattttccaaaactgtatgctctgcttcctttataaaaccgaaggcctttaacatcacccgagtcacctcttgaatgctttattgcttagaaatttcttccagcagataccctaaattatcactctcaagttcaaagttccacaaatctctaggacagaggcaaaatgctgccattctctttgctaaaacataacgagagttacctttgctccagttcacaacaagttcctcatctccatctgagaccacctcagcctggaccttattgttcaaaacactatcagcatttttgtcaaagtcattcagcaagtctctaggaggttccaaagtttcccacattttccagtgttctactgagccctccaaactgttccaacctctgcctgttaccaagtttcaaagttgcttgcacatttttgggtacttttttaaggagcacctcactccactggtatcaatttactgtattagtctgctttcaccctgctgataaagacatactcaagtctgagaagaaaaagaggtgtaaagaaaaagaactgtaattggatttacagtcccaaatggtgaggggggcctcagaatcatggcaggaggtaaaaggccttcttacatggcagcagcaagagaaaatgaggaggaagccaaagcagaaactcctgataaacccatcatatctcatgagacttattcactatcatgagaatagcacaggaaagactggcctccgtgattcaattacctcaccctgggtccctcccataacatgtgggaattctgggagatagaattcaagctgagatttgggtgtggtcacagccaaaccatatcaccaaatatggagagactgtggatcaacaagatcatctcaaactaatacaggaggtgagagtttaaattagaacaaccactttggaaagcaatttggattatcttataagtttgagcattctcatatgttatggcaaagtaattcctctaccataggccctggagaaactcttgcccatatgtaccagaggtagtaaaaaaaaaaaaacgctcatgtaattccattcataatagcgaatatatggaaacaagccagattttcattaataggagaatgggtaaattaataggataatgggtaaataaattatacccttaaaaactaaataatatatcatttaaggtaatcatatgtatgaaataaacaatgttttttttttaaaggaagagaatcctaaacataaattcagggtagtagttaccctcgggctgaagggtgaaaatcaggaaaaaggacagaggaggagcagatgttagggtcagaaccctggttctttggttgtgttgtaagttcacaagtgattaccatattattcaaatacatttacacagaggcccaggcacagacaaggatgaaataggagccaaggtatgctatgagccaaggattatgagtaatccagttttgtgcactttaagccatttgaaaaacagaaaagcaaaacaacaaaataatttttaagaaattgaatatagggtgttatgctctgaatgtgtccccctaaaattaatcaccaatgtcataagattaggaagtagggctttaaggtagtgattcagtcatgaagggagagtgttcacgaatgagtttaggatccttacacaaggactggatggagtgggcttcccctgttttgcccttccaccttctgccatgtgaggacacagtgcatctcctcctgaagacacagtgcacaagataccatcttggatgcagagaccagaccctcaccagacaccaatcctgctggcaccttgatcttggacttctagcctatggaactgtgagaaatacatttctgttcttcagaaattacccagcctagtgtattttctatatagtagtacaaactcattaaggcacaattcctcttgtcattttcttctacaattttctttgttgcctctttagcactgggtcattttatatttgatccttcataatatctcttacttttggtttttcacatttctgttccaaatgtattcttagatacatattttccactattagcctcagggtttgcctgggagtgtgtatttctgtgccaccgctgtaggactgtgtgtgtgtgtgtgtctcccattctctcttctctctctgtctctcaccctctgtgtgtttctttccctctctctgtcggtctgtgtgtgtgtgtttgtgtgcgtatgcccgtgtgcgtgtgtgtctttggacgaatgtgctctgttcgccaaaatgcaattttttgcatgttggccagtctttggtgagcctctttctgcatctctgcctgggtcctgtggccggttgtccatcgttttcacggcggttccactttgggtttgtgaaggccttgatcacttgaggagacgcgtcggtcccagagcaatcaaagtctcatccgcatcctgagcggcttcttttctaggatcaagaggaccacactccagcccaggacaaaaccccacagcagctcattgtccggcaggagaggagaagacccacctccaagaagatggttgtacccctgcacggctcttctctgagcaatgaagccacaccaccatacaattctgaagaggaagccgggaatgggagacggcaacaatccctgtccctggaatgctggcctctctggacaagtcacgcgtttcgcacccctccccttatgcccgtggcagtggcaaggttctgtaacctgcctgggctctggcctctgctctgtcctccctcttgcccggtctcccctgtttctgaggggactagttgcctcttggtctggctgaataacttctacgaagatcgcttcccagtccatcagggagacacttcctgtagatccttgtcatgactccttctctctccaaacctgtttctgctggattgggcaggtctgatgagcctggaacacttggcttccacacgtgtctcagacagagaagcttccttagtctccttgtttcacctcatgggtgggtggattgtctagaatgagtgctaggcgatcatgactggccttgtcttctaggacagatggtgtcccattacctctgcacgtcctgtctcacaaatgagggatatcctctcctctgctcgtaggtggactgactccctgaatcttttttctgtaacgaatgtcatgaaaccaaaggaacagggctgggcctggggatggggttgcggctgggtgcaggggaggttgcgtcagggctacctgggcggtggaggcttcggggtggggtgaatgttgcagagaactccttgctcctctggcaggcatttcaaaatgtggcttggactgaggcacaggcctcctccttgttcgcaggtgttctttgattttccttggcattcagggaaaagccacttgatccgcctttccaccaggcacatgcgtggacactaatgttggtttcatcattgcaacatatgcctccggtgacatacattcacaccatctgctgtgggatacgccagtgccacgcgtgatcgcattgtctccacctcggattctcaccgaccctgtttgcacctgtcctggaaagcggtgtctgctggcaggagccccacggcttttagaagtggggcacaccactgctctttcaacggaggagggaggcagagggctcactgatcagtgaacatttagctgacaccacgccttgagggccatgggatcattctgtgcagcagcgaggccctgcctgcctcaccagatgtgctgagcccttcctttctaaccaggaggggtccaaactaagatctgaagaggattcctgagaacccagcaggcgccttgaagctccccctccatcagtggaagtcggctcaaggaggtcctgaagactggactcctgggggtttggccctgggacaggatactcaaggccccttctcccacgccgccacaaactggacccctgaaccagccgccgccgtggcagcagcaggagcctcgccgccaccacggagcagtggcgttattgaaaggggacgcagcctaactgccaggagggaagcgcgagtcggcccagccaatgcgcatgcgcgaggcgcgagcggcttctcccattacagtggttcccacggttgtcttagaaacaagtcctcgaggcttggcaaagcgggagccttccgcggcagagcttgggtgtccgggctctgaggctccggtctgacctctccacggggtcgacgggaatgtctccggatgccaggagttgcaaagggcagacctagatgaggaaaccccaggcagagtcctggggaagcagcacggcatccgagcctcaggcttgcctggacggtgttggttggggtgagtctcctcaaaagtcgtgccgcagccgtgatctcgaggacaggtcggcctgcatgcccctgggctgctctgtcaaccgagggtcgctttctttgagagcagaaccacgcagcctcatgggttgcctggggttgtgtgtttcaatgcttctgctctaggactctgtgtgtgtgtgtgtgtgtgtgtgtgtgtgtgtcggtgtgtgtctgtgtgtgtgtctcccatgatctcttctctctctgtctctcagtctctgtgtgtttctttccctctctctattggtttgtgtgtgtgtgcccgtctgcttgtgtgtctttggacaaatgtgccctgtgcgccacaaagcggtttctcgcatggcggcctgtctttggtgagcctctttctgggtctctgcctgggttatgaggctggttgtaaattgttttcactgtcgcggaaccgctttgggtgtgtgaagacctggcccacgtgaggagatgcgacggtcccggagcaattgaaatctcatcccaatcctgagtggcctcttttctagcatcaagatgaaaacacagcaaccgaggacaagagcctcacaggagctctttttcccacaggacagcagctgacccaggtgagagaagatgcttgtatcttttcacggcttttgtctgagaaatgaagccacaccacaatacagtctgcaagaggaagctgggaatgggagatggcaacaatcgctgtcattggaacgctggcctctctggacaagccacccttttggaaccccgccccttatgcccattgcggtggcacggtgctgtaccctgcctgggctacagcctctactctgttgtcacactcgctgtgcctcccctgtttctcagaggcctagatggctctcgctctggccaaatttcttcaacaaagatgacttcccagtccgtcagggagacactacctggagatccatgttatgattgtttctctctccaaacgtgtttcagctggattccgcaggtctaatgaccctggagctctgggtgtccatacatgtctcaggcagggaagcttccttcttctccaggtttcctctcatgggtggggctgtggctggggctggggctgggtgcagccgaagttgcttcagggctaccagggcggtggaggtttgggggtggggcgaattttgcagaaacctctttgctcctctgctaggcatttgaaaacgtggcttgggtcaggcacaggcgcccccaccccccgggtcccaggtgttcttagattttccttggcattgatggaaaggtcactcgttccccacttccgccggcacatgcctggacaccaccatttgtttcgccgtcgccccgtatgcctccggtgacacacattcacaccatctgctgtgggatacgccagtgccacgcgtggtcacatggtctgcacctggcattcgccactgttcctgtttgcacgagccctgtaaagcgcggtcggctttccggagccccagggcttttagaagaggggtaggccactgctctttcaaaggaggagggaggcagagggttgaaggatcagtgaatttgcagctgacactaggcctcgagacctatgggatcattctttgctgcagcgaggccctgcctgcctcagcagatgtggcgagcccatcctatctcactcggtgggggccaaaatgggatctgaaggggtgtcctgagaacacagcaggcgtcctgaagctccccctccctccctcggtggaagtcagctcaaggagttcctgaggacaggactcctgggggtttggccctgggacaggacaagacacccgcggtcccctctcccacgctgccccaaactggaggccggatccagccgccgccgcgcctgcagctggagcctcgctgccgccgcgctgcggtggcgttctttaaaggggacccagcctgactgccaggagcagagttcgagtcgggccagccaatgcgcatgcgcgaggcgggagcggcttctcccgtcacagtggttcccacggttgtcttagaaagcagtcctcgaggcatggcaaagtaggagccctccatggcagtgcttgagtgtcggggctctgagtctccggcctgacctctccacgtggtcgacgggaacgtccccagatgccaggattcgcaaagggctgaccaggatggcgaaaccttaggcagagtccggggaaagcagcacggcatcccagcctcaggcctgcccggacggtgttggttggggtgagtctctccaaaagtagtgccgccgtgatctcgaggacatgtaggcctgcgtgcccatggggtggtctctcacccgaggatcgttctcgtcgagagcacaaccccgaagcctcaggtgttgcctgggggtgtgtgtttcaatgcctctgctctaggactctgtgtgtgtctctgtgtctgtgtgtgtgtgtgtgtgtgagtgtgtgtgtctatgtgtgtgtctcccattctctcttctctatctctcagtgtctgtgtgtttctttccctctctcagtgttttgtgtgtgtttgcccgtgtgcgtgtgtgtctttgccgaatgtgccctgtgcgccacaaagcggtttctcgcagggcggcctgtctttggtgaccctctttctgcgtctctgcctgggtcatgagtccggttgtcaatctttttcgccgccgcggatccgctttgggtatgtgaaggcctggcccacttgaggagatgcgttggtcacggagcaaatgaaatctcattcccatcctgagcggccagtttcctaggatcaagatgaacacactgcagctgaagacaagagccccacaggggctctttgtcctgcaggagagcagcggacccacgtcagagaagatgctggtatcttttcacggctcttttctgagaaatgaagccacaccaccatacggtctgcaagaggaagccgggaatgggagatggcaacagtccctgtcactggaacgctggcctctctggacaagccatccctttggaacccctccccttatgaccgtggcggtggcacggtgctttaccctgcctgggctccggcctctgctctgtcttccctcttgctctgcctcccctgtttctcagggacctggatgcatctcgctctggccaaatgtcttcaacaaagatgacttcccagtccgtcagggtgacatttcctggagatccgtgtcctgaatgtttctctctccaaacgtgtttctcctggattccgcaggtctcatgaccctggagctcttggcttccatatgtgtctcaggcagggaagcttccttcttctccacgttttccctcatgggtgggtggattgcctagaaggagcgctaggcgacagtgactggccttgtcttccaggacaggtggtgtcgcatttcctctgcacttcctgtctcatttttgagggacatcctctcctctgctcctgggtgaactgactcccttgatcttctggccgaaacgaatgtcagggaaccaaagggactgggctggggcaggggctggggttggggctgggggcagcctaagttgtgtcagggataccagggcggtgtagggttggaggtggggcgaattttgcagaaacctctttgctcctctggtaggcatttgaaaacgtggcttgggtcaggcacaggcccccccccaccccccggttcccaggtgttcttcaattttccttggcattgagggaaaggccactcgttcccctcttcccccggcacatgcatggagaacaccgtttgtttcgcgtcgccccgtatgcctccggtgacacacattcacaccatcttctgtgggatacgccagtgccatgcatggtcacattgtctccacctcggattcgcccttgttcctgtttgtaggtgtcctgtaaagggcggttggctttccggagccccagggcttttagaagcggggcaggccactgctctttcaaaggaggagggaggcagagggctgagggatcagtgaatttgcagctgacactaggtcttgagacctatgggatcattctgtgctgcagcgaggcgctgcctgcctcaccagatgtggtgagcccatcctatctcactcggcgggggccaaaatcggatctgaaggggagtcccgagaacccagcaggtgtcctgaagctctccctcccttggtgagaattggctcaaggaagtcctgaggacaggactcctgggggtttcaccctgggacaggacactggccacaccctctaccgggccgctgcaaactttaccccggatccagtcgctgccgaggctgcaacaggagcccatctgctaccgcacagtagccattgttgaaaggggcagctgcctgccgtccagcaccggagctttagtcggcccagccagtgtgcctccacgtggctctagctgattgtctcatcacagtgatttccactgttgtcttaatatccagtcccttaattttggcatagcaggagttctccatgactgtgctttggtgaaggggcttaatgcctccgctgtcttgcaggagttttaatacccctcccatcctgtgctgtctccttgctaggatcaagacgactgcaaaccagccaaggacaaaggcctcacaggtgctcattgtccacccacaggcgtgtgcccacagaccttcaagaagatggttctcactcctctcgccctttgccctcattgagaaagctacccacagctatacactgggacggagaaggaagctggctacaagatggggcaagcatgtctgtcactcaaacgctggccttcctcgccaagtcacccatttggcacattttcccggatgcccgtgatagtggcattgtgctgtggcattggcctctgctctgtcctccctcttgttctgtctgcccagttcctgtgaagcctagaggtttcttagtctggctcaatgtcttcaacaaagaacacttcccagtccattagggagaaatttcgctgggctcccttttatgattgcttccctccccaaacctgtttctggatgataggttgtcatgatcctggagttctgggcttccatacctgtcttggacaggaaagctccctttgtctgcatgtcctaagtgatggcttcgtggtccatcaaggaagagcgggaggcaaccccactgtggctgacctttgccttctagaaaagttagtgttgcatcccacctgcccttcctctctcattcctgagggccatcccgttcctctgctcctggggaaagtgcctccaagcactgaatcttttggctgccacggatgtcagggagccaaagggactgggttttgctgggtgcagaggaggtggcatcaggggtacctacaggtggcaggatgtcggtgtggtgtcgtttgtcgaaacctcttggcccctctggcagtcatccctgaatgtggcttggactcaggcacaggccctgtctcacaggttttctagtgtgcttggcttttccttggctttgtgtgggaggtcccagtgacccacctgcacacacctggacatcactatccgtctcagcatcgccccatatggcctcaaagacacacactgactccatctgctcttggggaacattagtgccacgtgtggtcacattggctccatctcggactcacctctgtctctccttgcacatgctgcggaaagcagtgtcgggatgccagagccccgaaccttggagatgaagtcaggccactgctccacctaggaaggagggaggcagtgggctcatgggtcagtgcattttcagctgacagttcgccttgcagcccttaggatctttctgtgccccagcgagacccttcccgcctcactgcattgtaaccccattcctgatcacccagtgggatccatagtcaggtcgaagaggattccagagagcccagccacaccctgaagctcctcctccaccggcaaccaaagcagaagaccgatcaagaaggtcctgatgacaggacctctatgggtacaacccttgggtctcccgcaggaccctctcgtagtcctcttcccacccgccgcctcggactgcgctgctgctgccaccgctgccccagtcccctcagccgcgcgtcgccgccattttttaaaggatctgccgccggactctcgggagcaagcggggattcagtctcgccagtgcgcatgcgcaaggcctgagcctccgctttggtcgtagtgattgccactgttgcccgtggatgggtccccgagactttgcgaagtaggagccccgtgtgatagtgcgtcagagttgggtctgagagcagtcctggccaaggcattaacaggatcgtctccagagcctgggattctcggagggttgaccaccaggaagaaacctcagaaggaagaaacctcagaaggtagaaacctcaggcggatcgccggggcggcagcgcgagatcccagcctcaggcccggattcggggagggtcgacgaggcccctttcccaatcttcacttcacccgccgcagcaccagtccccgcagccaccgctccgcggtcatttttcttttctttctttctttttttttttttatagtcggaatctcactctgtcactcagtggagtgcagtggcgggatctcagctgactgcaaactctgccgcccaggttcaagtgattctcttgcctccacctcccgagtacctggtactagagggattagtcagagtccgggctaagaccagtcctggccagggcatcaacaggatagtctctggaggccgggattcacggagggtcgtccaggaggaagaaactgcaggtggagggccgggcaagcagcgcaggatcccaggttcaggcctgcacggacggtgtgccagtgagtctcttcaaaaaaggagaggtttgcttgtgtgcccgtgggctgctctctcaccagtgggttgttgtcatggagagcagaaccctgaaaattcaggggctgcctgcgtgtaggtgttaccgtgccactgctgtatgtctttgtgcgtttgtgtgtgtgcgtatgtctctctcttgtttctctctctcccctttctcactcttttgctctgtgtccctgtgtgcatgtgtgtgtgtgttgggacatatgtgccctgtgcgccagaggacggtatcttctatgtccgcctttcttgtggtcagcctctccccgcgtctctgcctggcttgtgtggcccgttgtcagtcatttttctggcggttccagtttaggtttgtgaaggtccagatgaggtgaggagctgcgtctctctcataagaatttaaatcacctccccaccctgagaggcctcttttccaggataaaggcctccacccccaagccaaggataatagcctcaccggagaggtcattgtctacctgcaggagcagtgcagagcgacctgaaagaaggtggttctcattcatctctctctttcatctccttgagaaatctagccacagggtaacacaggttttgagaggatgggaacgggacgtggcaaggatctgtgagtgtgcaggctgtgtttcacatatcattaaacatagtccagtgagggttctgcagataactggcgtttaagtttgttttattgaatcaaggaaaaagaaaaaatactgagaaaaaaatgacgcaacttgcctgccagcccatctgactgttacaaatttaatagtagtttttatttatcttctcatgtaaaggtccttggcagtgatacctaatttcctaagatagccttgctttatattgtgtgattaagatgtcatgcatatcagagtatctggaaattcttctcaacgtcctttacatacgtgattaatcacatttccaaaataacataccaaaatgaataacagaaaatcattttaagttgtggttccttcatgcacaaaacatttcatgtgtgtctggcactcttccggccacagatttcatcttaacctaagtattgaaatgcttgtgccctttgattaatttttctatgtaaatactttgataataagctacactgaggccggtgcagtggctcacacctctcatcccagttctttgggaggccgaggccagcggatcacgaagtcaggagatcaagaccatcctggccaacacagtgaaaccccgtctcttcaaatatacaaagaattagccaggtgaggccaggctctggctcatgcctgtaattccacactttgggaggctgaggagggtggatcacctaaggtcaggagttcgagaccagtctgcccaacatggtgaaaccctgtttctactaaaaatacaaaaaattagcaggttgttgtgtcaggcacctgtaatcccagctactcgggaggttgaggcagaagaatcacttgaacccaggaggcggaggttgcattgagctgagatcatgccactgcaccgtccggcctggggacaagagtgaaactctgtcaaaaaaaaaaaacaaaactggtctatactaaaaatacaaaaattagaccctgaaggtcatgtccaaatgagaaagacattgtttggctcaaattgtctgacactaaggaatagtgcagactggacaaatgaggtgactgacacctgtaatcccagcactttgggaggccgaggccggtagatcacctgaggtcaggagttggagaccagcctgaccaacatcgtgaaactccatctctactaaaaaaaaatacatgaaaattagccggctatggtggtgcatgcctgtgtatcccagctactcaggagtctgaggcaggagacttacttgaaactgggtggcaggggttgcggtgagtggggatcacaccactgcactacagcctgggcaacaagagtgaaactctgtctcagaaaacagaatagtgcagagtaagagcagatttatatatgcatgtatgtatgtatgtatgtatgtatgtatttattttcagagaagcagggaatctggaattttgggtgaaatgtctgtttccagaaggtgaaaatgctctcaaatggaaaattcaggttagcctatatcaagcttctccttgttctatgtgtgaagaccatgggacagagggagcagcttgagccaagtcaggatggtaggatgggacaggtggccagggctgctgcactgggaaccctggtggaggatttggctggaaatgcaggtgggaccagaccatgaagactctcaaacacagacctgaggactctgagctttatcctgggggcggcaagaagccatgttaggtgaaggaacaaggctgtttctcccacagcactagtgcaaggaaaggtcagggaggccctcagtggaagcttgctgctggatttgttgatgtgccttttctcctgcctgcactagggtcagaatggccttgggtactgcacacttcctaccaggaatagaaggcgccagagctatagcacttctcttccctttagttctttggaaggatgagcaaattattcaccctctctgagcctcagtttcctcatccataaaatgatgacagtacaccaacctcgcaggtcacaaggatgttatgaaatcaggtgagcacagcatagcagttgtatttttgggtcctattattacatgtgaactaagttgccttgtagaaaaagcacaggctcaggggacctgtgtttcaatcccactaagcccctgtaatgcccacctctcagggatgatggaaagattaagttcaaggagacgatgcttgtgcagcatctgatacccagcagatacctaagaacctaacctaccacccccctgagcaagcacaacagtcctgctcctcctgcaagtactggggatgctgcctcccacccgccttagaacactgctcctcctccctctctgcaggaggcattttgtaggcctcagttgctgggcttgctgtcctctcacctgcctctcagcatggggctcagagcacacattcttcacctttgcaagaagcttctctaggcatccctgcccccaggcttgctgagtgcattcacctattgtcttatttataatccagacagagttactccctactgtgtagatgatgaaatggggacctagaaagggaaggaaagaccaacactttgagcacctgcaatgtgcctgaggcaatgtacgcattagctctgcttcacagcagcccaagagggaggtattattcttcccctgtgtaaatgtgggtgttgaggctcagagaagggcagtgacttgtccaaggtcacatagcaagcaaccgtcagtggctgagggctaacccaggtctttctgacttcagagtgtgggatttagaacaaacatttgcaacgtgagattgacagatccatcccccagtgctgttccaaagaccagatggggtcgtaagtgtgtgagtacctgatatggtgcccaaggactgggagtagaagcagaatcccatccacctccacctaatcatacagagaaaggagacaggagcccagggagggcagtgctgtgcccaagctgtcagcaagcagtaggcagagcccaggcccctgctttcccatgcccaccccttcccagttcagggcaaggccacctctccaggccctttccctcccctagagaggaaactccccaagttcctctgaccagacaggagagcgaatgagagcagaaaattccacttcggcacacacacctggagcctgaagctgaaagctggaatcccagactttgacactcaagaaggcacctccacactctttcagcacctccacctgggaccttcatgagcaccttgcttccctcccaggggagaggggtgtcccagagacactggggcccttagaaggcactatgagttggcagtgactgcagcagcgtggtgggattgcgggtggtgtaggaagcaggggaagcagatcacagcactcaggatggccagagctgaaggcatcagagtcccctgcccttgctctgcaaaaaaaaaaacccatggcatattcccctcccactccacacctcccacggtcagcagtaggccccagaggaggagcagcgaggcctcaggaggacagcagccactgctggcaagacgttggtgttctcctgttgaactgcacaggttgtcagcatcagacaaggtcgctctgtgaccatgatgggtcaagacaaagcaaggtcacttggtagctatcatggctcagctcatgcaaaatatggacaaaaatgacctcataccccctcccctgtgtctatgtcttcaccactacctctttgtcaattgcagcgttagctttgtttttgtcttccttccttctaggtaagattggggaagatgccaggtgatagaatccaccctgcctctgacagcatccaatctggagcaaaggcttatttcaaccctcccccaagctcccaatacaagcccaaattctggaacaggtcctttccaacacctccttcagagaagctccctggctccaggcagtgcttgctcccctcactgcagcaggaagcctaacttgcgaactgcaggtgtgctccaggtggtcactggatgcaaggcattgacagatggatcccatcgatacccccactgcaaaaccatgtaagcatatcatcccccacttgcacatgaggaaacggaggcccacagggtggggaagggaagacataatttgtccttcaaatgcgataccggtgagatgtgagaggcagcacccctcataactcttcgaggcagtgggcacaccaggacccttccaggcagatcgggtatgtggtcatccgcccattgcatagcatgtgtgggagttggggagaccagacatgggtctcgccacctctccactggcccgacctccctgcaggcccccaggacagggttagcatctgcttgctggcaggcctggccaccagagattttttcttatgtctaaggtccctgtagttgtggttcacaggatgggggctgctcctgagattcagcaccacacaggcactgcacagcactgtgccatggtggtgggcactcgctttccagatagggcccatgttgccagcaggcatgatgcatcatttaccctaccttgagtgcaatatgtggttttatagaaaaaaacttgggccaggtgcggtggctcacacctgtaatcccagcactttaggaggccaaggcgggcggatcacaaggtcaggaactcaataccagccttgctaatatagtgaaaccttgtctctatgaaaaatacaagaattagccagatgtggtggtgggcgcctgtagtcccagctactccagaggctaaggcaggagaatcacttgaacccaggaggcggaagttgcggtgagccaagatcatgccactgcactccagcctaggcgacagagcaaaactccatctcaaaaaaaaaaaaaaaaaagaaagaaaaggaaaagtatttgtagatgaatgaaggtgattcctttgaatattgaaaatgattttattttagccattggtctgacactcattccgatggggtgacatgtgtccctgccttagtcagcagagcacaggagtgtgctacacctcccctcatctgaagattcagcccatgagcaggaacgcctgtctttgtgtcataccaacagagaggatgtgtctggtttcaccattcactgcagaggcagaaattacccagaaagaagagatagtctgttcccgggagtgtgtccttttgacccagcatgggggtcatctcccttccttggccaggacccccaacctgaacacagaggtagagaacatgtgaagggctcccattcccaggtggtccagggtgcaagctctgagcctgtggtcctggtcactgcccttttctccacagcatggcagtcaccatcctgggctggggtacagaggggctttgcagagatcagcataacaaaagcatcactgagatgctgcaataggaaaccgtgataccttcgtgggctgccaaggcagcctaagctatttgttgctgcactcagtgtccccagacagctgtgtggctgtcactgcctctggtgtgtccattttacttctcttctcctgcctcagcttctgctctgaactctgtctctaacttacaagaaatcaagctcactggattctgagctcttcggggtcaaggactgtgtcagtagttcatgtctctttctagagatcacagcttagtatctggcacagagcagatactcagccaatgccaaatgattcatttgccagaaggctgaatttcatccataatcctagtcaatgcaaatacattttgccggtggggtgtgtttgtcctctgaaggcgttttcccaggctttgtaaatacatacaggccatttagaaatttgaatgtcaaagagtaaaggagcttagaaagtaagcattggagaagtgtgggagggtggtattatttacaaaacattcctgggtccttgtgagttctatacacccttgatgagcactgattctgggccaggccagacacccagctggacccaggagatactgaggtgagtaaagccaaaatgcctccattcagcaggaggcgggcagtcacaccaaagtgataaaggcacaaaatgcagaggcagcagaggagcaatgactaccttgttccaggactctgtgacctcagggagagctttcagaggaggacatctgtgcaaggcttggaaggatgaacacaaatttgcctagcagaaaagggagccaagcaaatcctgatggagaacagcttgggtgagagtgtgagccacaggattgaggggctcaggcatgtaactggaggagcagaaagaatgaggggagataaagttgggaggtcagcagaggtcagtcacagaaggttttgaatcctggtgagggagcaatgggtgctgcacaagggacatgggcctggaggagatgcagttagctctgagtgaagatggagcatgccatccaccagggaaccacaagatacaatagaaataagaaccctgagaagcctgcacaaagaatgaggggcccaggggtagcaccaagaaggtccctgtcagagaccagctttgaacggagacagaaaagactcttgagggcctcagctgctgcaaacctcctcaataaatcatattttaccttccaatatttgctaaagaatactaactattggaagagcaatggcccattgataataattattccctcaatgtacattttttacaattctcaaaatgctctcggtccagtctctcatgggaacccccataaaatcccattttacaaatagggaaatgaggccctgtgatgtcacaccgaggtttgcagcagttccaggatagaaaataggaagcactttcatctcagccctgggtataagtctcaaaattccttttcggggagggggtccttgaggccatccagcagcccatagtccaagtctttttcttcctccttgggcttctccacacctgtatccaaagcttccttctcctcctttgttctcaggtaccactaccagttgttgggcagggagacctcctgctgctgcccatcctatgttgcatcctccaacatgggtgcactgtggttcagccagcacctataccacctgcagcccagggctcctgtggtgggcctgaggttcctccctatcaaatggagatatgctgaggttgctgcctttgctgaagcccatgtccaggtcatcttgggggtggccaaggttacagggtcctggggacaggccagagggctgcaggagcaaaaaccaagaggatgaggggatctctgggtcagaccgcctggatccacatcccagagactagctgcaaggcctgaggaagaatggttcacttctctgggtgtcagtttcctcccctgtaaagtgggaggtataacagattcactcctacagttgtctctgagctttatagcaggtaatgtgtgcaaagtacttcccataaggcctggcacatggtaggtgataataaataataaacagggttactatgatatcatcatctgagctaggtcactcatgcacctctccaatgcttcagggtgcccctccatccctcacagggtagcagcaagtgaaagggatccccctggccttgaggagctcacatctacttatttcccaggggtctctgtccagtgcccacacatgcctggcatgtagtaggtgcctcatccacatctggtgaaagagtggaaagcaggtcattatcatgtattgtttggcacagaatctgcagtaggggacagagaagtgagtgactgtagttgtgcccaccagttcctgtccctgaactttcagggatcaagaggccttagcaagtctagtaccagggagtgggcactgtgtggtggagcaggaggcaggtcttaagaaaggcagtggggtgaggagaggagatctgcctttgaggtctgggagatcctctaccaggacctcaacaaaggccccaggaaggtcatccctcctcccagaatctctctatactcttctatataatggggctagcctggaagagatacttgcacaaccatgttcagagcagcatcatccacaataaccaaaaggtggaagcaacccaagtgtccgtggatggatggacggatcaacaaaatgctgtctatgcatacagtggaatagtgttcagccttgaaaaggcaggagattctgacacctgcagtgtcaagaatgaaccttgaggacattaggctgagcaaaataagccagaccaaaaagacaaatgttgtattattccacttttctaaggcacctagagtcatcaaatctatagagacagactggacaatggtggctaccaggtcctggggagggtggtgattggggagttgtttttaaatgagttacagaattgtagttttacaagatgaaaagcattctggaaattggttgcacaacattgcgaatgtatttaatgccactgaaatgtaaatttaaacatagctagacagtaaattttagtttattttaccagaatttttataatggggtagttatgcctgtctccttgtgttgctgtaggatttcatgagataacatataaggaaccacccagcatgttgcctggcacatagtaactactgtattatactgggttcataaatagcactcccccttttcccttcccacagagtgcagtgaatagaagacacttctctgcaccccaaaagctccatgctgattgtgagaaggaaatgctggatggaggggttcctggaactactgtgaggggtgagctttctccagatgtctagaaatgaggcagggaccctacatcttccacccccactaaggttaccttgcagttcccagctggctctatacttcctggaaactgccacttttctgcctccattacctcatagccctgtcagcaccattatcttcatcaccatgatcgccatcaccatccttacaatcaccaacactatcatcatcgccatcaccattcttaccctcgccattctcaccatcattatcatcattactatcactatcatcgtcactatcaccattctcaccatcatcctcatcatcatcaccattatccttaccataactatcactattatcatcaccacctttgccatcaccatccttatcatcaccatcacaatcaccaccatcacctttctcaccatcaccttgttcacctttaccattctcaccatcatcatcaccttcatcatcctcaacataactatcacttcattatcaccacctccaccttcaccatcaccatcctcaccatcatcatcaccaccatcacaaggatccttgctacatgaaaccatgcattctgggtagcagggctcttgggtcagggcttctaacacatcttgtaggatagaaacccagcccctcagggtctcacagttggtgaagtaactgattcttgtgaggtcatattcctctgggtgatgtgggatgtcacaagaccaataaatatgggctgaagcccatcgcatcacttcttttcttgtaaaataagctccatcatcagtagtaattgtatgatagcagagaataagaactcagcaaatgtaaataatttgatgctatcagaagcatatgaagtggagtccatattctgatatgcatctattccagtgagggcaattctttaccacttccatgaaggaagggaaaaaatattattaccacattaccagaaatctgtctggtctaggcaaggcagttcctctatccagggtctcattattgctcattgtcggccgtcagggcactcatctgggcagtaggcagcactgctgcagggaagttcacgttattggaaacatgtagcatcttctcctgctaccatcgccacattgtccatgaacccactgggcaaatgatgaggaatctgggaaaagatctcataaccagaatataatcatccacatcaggatatcagcattcacccaacactactgtccaatcaacagacgctataatctcacccaaattttctcagttgtgccctaaatacagtttttttgaactttgtaatccaggatccaatccaggatttcccattgcattaattgtcatgtctcctaagctctttcaacttcaaagagttcctctttttttccctatttttcataaccttaagagttttaagagcataagcatttatgaaggatgtgttcacctttttccatctgatgtgtttccacatccagacttaggtcatgtatctttcacaagaaaatcacagaaataatgctgtggtcttcctaggacatcccagcaggaggcacatgatcaagtttgtgccagatttgtccaccacaaagtcatcattcttccaattgtaattgagaagtatttcatatgaagatattaattacacatacacatgaatgcatatttatatgtaacatacatacaaaatattatttcaatgtctaaccaatataaaagttattaattagatatgtttaattttatttcctactaagtcttcaaaatctggtgtgtgttttaccctgacagcacatctcagtccagcctagccacatttcaagtgttcaatattcacatggctgtggctaccatatttgttagggcagcactaaagcactaaagaacttcttccttggagaagttctaagctttcaaaatgtttggcaaatacattttataaaattcttcagaatccataaataggcaattacacatttagtaagccatagaatccaacatggcattaaaaatgaatccctcgacaaaaaagaaggtaggcaacattttcttcagaccaaatggacaaatcaattatgattacctcacatgcccattattatttattaacatctttcattaatacccccaaaccccatcaacaggtaaatgaataaatgcattgaggcctatctgaacaatgtcccaattccttaccattcttacttcttttgcaagcagaaaagactcagtattagcaaagactattcagatagtttgttcttatgccagtagttgtaattttctggaggtctatgtgatatcaattatgtacttcaatacctctcacaagtacttttcctgtttggccattttctgcggtatatccatgttcctattttctctattcttttatttctatcctagacttttcttttatcctataattctttatcctaaaaatattaatttaaggataatgtcacaaaatattatatttcttcagatgatactccaaattgatacttaatatacagaaatgactatcatggacataacccacaacatgtgaaatgtatggctcattctactgacattatacaggaaagttaatgacaactgaatttctagtcattttccacccaacaagttgcttataaaatgtcaaggaattgtaggtatgtacacagtggctatttttgggtggggtgttcagcaactctcctcttgagagccccccttttctttgaggaccatttcaatgagaaccaactaagcttgacccaacctaccagccccagccctagaggtgatcatgatgcccagctctggtgaaagactctacccttggatcatagcaactgtttcagtactttttttttggaatcatcaggaaggactcttgctttttctagcactgtggtctgtgaggacaaagtaagtgtgttatttgtagcactatctcttgctacagagagggaagagagtcatcttcagaaggaaaaaatgaggctaaaacaaaaggaaaagtgtcaagagaaagaaggagaacatttcttgatgattttatataagcccctgggtccagctatgcatgacagcaacttgggttaaagctctgtcgcttatgggaccattgacttaaatataaaataaagtattaaaagctatgaacttttagatgaaaatacagaaaaaaaatctttgtaatattcagttaatcaaaaatgtcttagatgaagccccaaaaaccaaatgcacaagaacaattaataaattggaccccatcaaaattaagagcatctgctatttgaaagatagtgttatgagaacaaaaaagaaaactcaaggggaaaatactggcaagtctcatatctaataagggatttgaatccagagtatataaagaaactattaaaatttaataatgagaaaataagcaaagaaaaaaacaaaaaagaaagaagcaaaataaacgtgaacatacactttaccaaatatatacagatggcatgtacgtacatagatactaaatattattaggcattagggaaccacaataaaatactattgtacaaacaggaaaatgtctaaaattttaaaagaaggcccatacaaaatgttggcaagagtgtggaattcttatatactgctgataaaaatataaaatggtacaaccattttggcaaacattttgacagtctcttaaaactaaacctaaacctattaattattacactcctaatgtttactcaaagttagaagaacttatatacatgaatgttcattgcaaatgtatttgcataagtccaaaaccggaagcaatgcaaaaacccatcaacaggcaaatgtatatataagttgtgaccgatctgcacaatagaatactactcagtcataaaattaatggcctattgatgcctgcaatatagctgaatctcaaaataattatgctgtgtgaaagatgccagacccctcctaaaaagggtccatactacacttcatttgtataaatgtctagacaaggcaaactattttatagtgacagattggtgattgccagggagagtggtaaggtaggaagatagaaaaagtttgggattataaaagggcaaggggaaacttttatgagtgctggatatgttcattatttttattttggtgatggatttgcaagtatacataaaaaataacatgcaatggaagtagaaacagtaattttgtttctttcttaaaaaagcacaatttacttactaatgggatgtgtgtgcctgttgggcacacagcacaacttttcaaatcttaaaatcggactggatctcaaccactggaccttattcctattccacactgactttagcacaatacttgcttttatcgcggtaattaacaccacccaccttaaaggtaaagaaatgcacttctaactaactacttttgaaactctgaactgcctcaggctagtagttcttaaggtctccagcaaatgttgcttcgtttctctcaaaaatatacagcctgggcaacatggcaaaaccccatctctactacaattagaaaacttagccaggcatagtggtgcatgcctgttgtcccagctactcagggaggcagaggctgcagtgagcgtagacctcaccactccactccagcctgggggacagagtgagacccccatctcgaatacacacacacacatacacagactcacacgctatccactggtgcccctgtcagttaaacacagcatctcagggcaccttagcacacagtgtgagagccgtggtcctaaacacttcaattaaaagtgaaacatctctggctggatttttagaatatttactttttaatgttttatattatatttacttttatgttttaattaatttatctgaatacatgaatccagacatttggaagtaaaacaatggaaaacatgcctgcaaacactaatcagcacaaagctcatgttgctatgttattattgccagtttagacttaagccaagaaatattgctaagataaaaaagattttacgatgtcagtcactagaaaagtatgccaattttaaatatgtataaatataaaatatcccttcaagttatttaatacagaaactgatataactaaaagaaaaatggactaatctacaatatagattttaacatacctttcaattaccgatggaaccaagagaaaaaaatccataagagaaagggagattggatgaacacaatgaacaaacttgacataaactgacatatacagaacgtgacactcaacaactactgaatacacatccttttccagtgcacgtatcatatttaccaacatagattatatgtcagaatttaaagggactcatcagagtattcagtcgtgggattttgcctaaacttgtctggccttcaacagggttcaaatacagttaaattcttatttcatctaaagagtcctatccttttttttggaaattttaccgcaacaatctaaatttgcataacaactgaacccagcccttggaacttgaagtttattctagccaaaggcagattaaactgtctaagtagtaatgtccttcaaattgttgtcccctgctccagtaacggagtatagctccaagaagctaatagactgtttgtacttcatactatacattctatgttacatcaaaacacggtataaagccttgaaatcagcagcagagagaaaatgagatcaacaaccatctagctgtgacctcactacttagtaattacgcttttagctgactcctttacttgattcctaactgcttatttctggcagggtagcactaatccctgaccaagctgaccttttaagaagtgagcagaacgaaaaggctctaccaccagtgatcagtttaacaagctgcaacactaatcactggctgcaactctagtcactggctgcaactcatattgtgggttttaagagctcagaattaacatggaaatactattgactccaaaagaaactcagaaatctctgggaatccagcaaagatagaaagggtcctctcaatagtcaccactcacactttgctttgttttggtaactatttttattacatacggagaatatcaaaaaagtatgccttttcctcattgtgaatgctaaccctaaaatggtaaggcccttgcaggttgaaacccccaggctctcactggcccttcaacagaaggcagtgaagtcacctgcaagagtgatcacccaaaagcttccaggctggacgagttgggactcagttgccaaattcacagttctcttgggacacggttatttatggagctcctgaagatgagaaattccacccaggaaattctggttataaaaattattcacggccgggcgcggtggctcacgcctgtaatcccagcactttgggaggccgaggcgggtggatcacgaggtcaggagatcgagaccatcctggctaacatggtgaaaccccgtctctactaaaaatacaaaaaattagccgggcgcggtggcgggcgcctgtagtcccagctactcgggaggctgaggcaggagaatggcgtgaacccgggaggcggagcttgcagtgagccgagatcacgccactgccctccagcctgggcgacagagcaagactccgtctcaaaaaaaaaaaattattcacatctaattatctcaggagacatcaacacagcaatgttgaaaatttcccattaattgttaatccatggagaaaaactggacaattattttttaaaatatgaaaagcttcatataatacaaattatactcccacatgtgattcaatttctattaatggcagagaagttaataattacgaattgccagtggttaaaaaaaataaatcattcggccgggcgcggtggctcacgcctgtaatcccagcactttgggaggccgaggcgggtggatcatgaggtcaggagatcgagaccatcctggctaacaaggtgaaaccccctctctactaaaaatacaaaaaattagccgggcgcggtggcgggcgcctgtagtcccagctactcgggaggctgaggcaggagaatggcgtgaacccgggaagcggagcttgcagtgagccgagattgcgccactgcagtccgcagtccggcctgggcgacagagcaagattccgtctcaaaaaaaaaaaaaataaataaaataaatcattcatcgttggagacgtgcagaaggtttaaaagaggtaagaattagtttttgggtttggggcgttttacgctttccaaaaggttttgctctttttttttgctcatggctttctctctctctctctctttctttctgatttcagtttcttttgatttctcctgcttagaaatggtgagagaactttggatgtggaacgtggaggaggaggaacacgaagtggggatctccacttggggtggtcagcactgcgggtgcccagcaaagtcactgcctggtccacatcccggaggggtctctgcgcctcagtcggcatcgcagctgatggtgaaacttttggtgtggcagaagagtgtccacaaacttcggaaggtatccgctacatcctccatagccgtgtatccctgccgagggcgatcttctgggggagcggaaagtcctgctcatgggccagggctggctggctggagccacttgcgcggcgcagccctggcggaggttcaggcggccccggtgtcgcaagcggctgtgagtgatgcctccttggggccggagtggtcccaggaaggctgcagaccagggctgaccagcgggcagcatggtggccacgatggaaggtgatggggttcgcagcgccaggggacccagcagagcccgagcccgggcatcccgcatctccagccagcatcgcgggtaggcctggcgctggtgaagtggcggccagtgcacaaggcccatgacccagtcccagaggccagcccattgtcagctaacttcaggaaccccgggccagctgaggccccgggccccatgggcaagacaaagggcagagggtccgcaggcggggccgagtgcaggcagtgcaggcctggctccaccgccgcggagctcgcagggcgcagcaggcatcgggcagtgaccagggcttccagaggaggctgtgcacccctgcaaaggctcctgccctgcgtccagcctatccgcggagactccacgtgcaccccctcctcattgtccttgtctagggccgcggcaaggtcctcgctcccatggcatggctccggggcacaggagcctgggctgagcaggtggagtagggtgagctccgccaagaacccagtgagagtggcgccccagggcggcacaggaggccgcatttaacgtgtcaatcatctcaaagattttatggcatcttctttttgacatcttataatatctataatgtttattatatcttgtgatataattattaacaccacttcattgtgattattatgattatttttataacaacacatcttcaattattaatattcccagttgctagagaaaaatgaaaacgactagttttgaaagcctcacctctgccaatggaagcacattcaagcatgtcgccaacgcaatccactttccaccactttcacaaaaaacgttactgcacaattatactatcctaccctcatatactttttttgtgtgtgtgtacttgtatgtatgtatgttacatatgagatatatatatatatatatatatatatgtatatatatataaagtatgccagagatgaacaagtattagaaaattaaatgcagacaggtcatgtcagtgctatgtataatgtggtgtactaagtatagatgttcaacagtgtgggatctaggctggaacaagactcctagtcttaagcaattctttctaggttcagtctctggaaataatgccttgaatcaaatgtgtgagaaaatcaatgggttttaaagactattctatgtcaactataacatttaatttggggatttctgtcccttataatgtctacctcattttggatggaatccttgaggcctggtttatttttcttttcctttctacagatcgctgctcagagtgaggaatggagttgtgttttgaataaaatatccacgcatccttttgtgagcaaggagcatgatggtacttagacctaccatttctcgttatggtggttgcggttacagtggggctggggtgtttacctggagcctggacatccactgggacatgatacccactgggaattttttgtgtcaatctggtctctgatgtccacctggggattgggtatccacctaaggcctgatgtttacctggagccagatgtgcacctgagacctgatgtctatctgtggccttatgttcccctggggaccgatgcacacctgaaggataggtattcatctggggcctgatacccaccagtagtatgggtgtcaaccttggggctagtgttcagctggcgtccactgtctacttggggcctggtgtacacatggggcctgggcatccacctgagacttgatgtttaatatggtctggagttcttttggggcctgttgtaccctggagcctgggtgtacacctggagcctgatgtcccaggtgaacaactgggtcccaggtgatcttcaggccctaggtgaaaactccaggctctaagtggacaaccaggctccaggctgatgtttactggggccagatgtctaccaggccccaggtgaaatccccaggctccaaatggacaacatagccccaggttccaggtagacattggaatccaaatcaacaccaggccccagatggacacccaggcctgtggtggacatcagactgcagaaggtcatctggctcgaggtggacatcaagccccaggtggatacctagtccccaggtggatatcaggccccactttgacaccagtccctgggtagataccttggcctcaggtggatatccagtctctagctaagcatcaggctccagggggacccaggccctagctgactggggactagtgttcatatggggccacatgtccatctgggccctaggtgtcaacttgtagcctgatgtcaacctggaagctggtgttcaccagagaggactaaagtcctcctggtgcctggtgtccaacttgggactttgtgtccacctggagaccgatgtccacttgggaccagatgtccagctggagcaagatgtccacctgcagcctaaaacttcacctaaggcctgatgttccccagggcctacagagcctatgtatctacctagggacttgtgtccaggtggggcctgaattccacctggggcctggaattaacctgggacctgatgtccacctgagacgtgggtgttcctctggagtctgatatctatctggggcccgggtgtcctcctgtggtctgatgtccacttgtaggctggtgtccacctggggcctgggtgtccacctaggaacctgatgtatacctgaagtccagtgtctacgtgggtactgatgtctaccaggaaagtgatataaacctggggcctgatagccacctgggccctgagtgtccacatatgttctgatttctcttttggccttagtgtagggcctgagtgccacctgcttcctgatgttcaccaggaacctaggtattcacttggggcttgctgttcacctgggacctaatgtccatgtgaggcctggtattcagctagagcctgggcatccccctgtggcctgaagttcagttgctgactaggaattccactaaagcttgatgtccacctggggcataggtaaccacttgtggcctagtgttgccctgaagcctaggtgtcaacccagggcataatgtccccttggggcctgctgtccacctgcagactggtgtctacatagggcctggtatccacctggggtctggtgtctgcctggggcctagtgtccacctgaagactgagtatagacctcagatctgatgtatgcctggggcctatttatccacctggggactagcattcatctggggcctcatgtccacttaagccctgggtgtcaacctggtgcctaatggccaccagggatctatgtactcacttggggcctggtgctcccacagggcctaggtataaacctggagaatgatgtgcaggtggaggtggatgtcttcctgggtgctggtgttcacctggggacaagggtctccctggggaccagtgtttatcgggagcctcatatgcaccttgaacctgctgtctacctagggcccgatgtccatgttaaggctgggtgtccacctgggacctggttgtccacttggggcctaatgtccacctaagacctagtgttcacctagggcctgggtgtccacctggagcctgatgttcagctggagatgcatccatccgaaacctaggtatccacccaggttctggtgtcgacctggggtcttatgtccacctggggactagatatctacctgaggcttgatgtccacctggagcccgatatccacctcagagctgggtgtccacccaagttctggtatccacccggagcctggtgttcatctggggcccagtgcccacctggaacctgggtatcaccatggggcctgggtgtccacttggaacgtgatgtgcacctgggacctgagtttccacctagggcctgatgaccaccggagacccaggtgtccacctggggtctgatgtctacctgaagcctaggtaaccacctgtgccttggtgttacctgtgccttgatttccacctgagcctgatgtacacctggggcctgggtgtccatctgaggcctgatgtacacctcaagtccagtgtccacttgtggcctgatgtcaacttggaagctgatatccacctggggactgatgttctcctggggtctgatatccaactgggatcagatgttcacctaaggcctggagttaatctggggcctgatggtcaccagggacccaggtgtccacctagggcctagtgaccaactagggcctgatgtccacctggagtctagtatccgccttggccctgatgctacttgaggcctgggtgtcttcctagaacctgagtccccaactgggccctgatgtccacctgaggcctggtgtccttgtagggcctgatatctacctaaggcctgggtatcctcctgcagcctgatgctcacctgtaggctggtgtccatatggggcctgggtgttcacctgtgagcctgatgtacacctggagtccggtgtccccttggttactaatacgtaccaggaaaatggtatatacctggggcctgatatacacctggagcctgtgtgtccacttgagccctgatgtccacctggggcctggtgtttacctggggcctctatccacccactaccgaaagtcaagttaggaaaagggcccaggataggtgaggagcacagaacagggacctcattcataagaaattctgctgtagaatgtgtgctctaagctcttaaaacagctctgcctcaggaaagactgtccagggcataggaagcccacacacagggtgggatgacaagtttgcatctggcacggctgggagccctgggggcctctgcccttttggccgcgttgtctcctggcttttagggtggtgggattctcggctctgattgcagcaggtggattcacttagctctcctccccttttagcattactgtcttctgtaataaacctctcactttgatctgccaggctgtcaaatgctttgattgccctctctgttttgttccaatggttcatcaatccaaatatccacaacacaaggacagattttagtctcttcatacagtgggatatttcacagctattaaaacaaatcaaataaatgcttgtgtattgatatgcaaagttgtcctgcatcaataacttttaaacacattttatgatcccacatctatatctatacataatgtttgccactgcttaaacaaaacaaaatctaagctttagactccaaatggaattacaggggaatcttgatgtctgtgttctgcagttctgtcatgtttgaaattgtcaaataaacatggtgcctttccagtagccactcagaattcctcctctctgtccacaaagcattgtcaccctccctgtcccatttgccccagccctgtggagctcgctgagctggcaccatcatctcttgtaatagacgaagacattgaggaccagagaggggaagcaccttgttgacatcccacagctctgagtcaaagtggacttggtctcccttactagatgtttcctaaagtccagggagccctggaggcccaggaatgtaagggctggagcctggggctttctgtcctgaggtaggggagctcacggctacagttcacggcttgagtgcatttcctctcaagtacaataacggctgctttgtaagatggaaaatataaatggctgcctgcaaatttgtcaggtaatgtgtttgtctcccctatgggactgtaaacttggacctgtctgaatcaccctagtgtccccagcaccaggccagagcctgacatataaaatgactgacttcattaaataccaacaccttctaggtgccaggtactgctctagatgctggaatctgcagtgaataagatacccagaatccctgcccctcactgtagtagagcagaacagatgatgaataagtaagcatgcagggtgtgagatgggtgggagaccgcattgtggaaccaggcagtgtgcaaagcggacactcaggaaagaacctgagggttgagctgtggatataatgtggatatgatgtggatatgatggaggaaattcgcccctaacatgagtggagacactccagctacaataacaagcgaaggtggagaaggaagcacagaggcaagcagctggggagatgtgggggtgggatccagggaaggttctctctttattgcatctattttcaaattgaaataggaagcaaggcaacaggtgtaaggaaggctgaggaaggttttagaggtttaaggaggaaggaggaggcaagatactgttgcttggggacagggcagcacttctagagctgggtgcctgggctccagggcaagtcacttcatctcttcctgtgccagcatctcctcagctgtgaaatagtgattattatagaacagattcatagagtttgatgataattaaatcagttggtattcataacatgcttagattatatatttttttattaagataacaaagaagtctggcagacttatggactcaggaaatgagtgagtctgtagaacatcatccagtgcccactggaggtttgggcttgatgattaaatgagagcaaaaggcatgtgtgtttctctctggctgtgcacagccacctgagtgcaggagcagagggagtgggtgcctggttttcagcagagtgcagttttcccctgggagtacaattatttgtggggcaagagagtggagagtgttagagagggtggatgacaggctgggccatatagtctcagctgggaggaggggaaatttgcaagaaagtgagtgagacacaaaagtgaaaatttggagtcattgaagtgtgtcggagttgggaggcagctggaaaaaggaaaatggtggtcaaaaaaagggtgtttgaaattgagggtctggagtagctacagtttctgcagtgataaggacaagaatttacaggtaggagtgggtgacacagggagggtggagacaaggtctctaggggtggagggaccaagagccagagcatgaggaggactctctatgtgcatgttgacatcacctcagcaggagaaagtgcccatgaaccgggagccaagtcctcaatgcatagggatgcggccctgggtgcaatctgagggcaagagcttcaatattgattcccttcgtgtgtcaccgtgtccttgggtaatttttctttgtgtgaacatcacagagtgtgcttacacacacctcaatattgtacctactgtacacctaggctctgtggcacagcctactgctctcaggccgcacacctgggcacaggttactgcagtgaatactgttggcagttgtagcacaatggtcagtacttgtgcatctaaacgtatcatgaaaagtacagtaaaatcgtagtattgcactatataaaaatatagtatggtacctagacatggtgcactggtctaggacacttatcatgaatggaacgtgcagggctggaagcttctctgggtgcgtcagtgagtggtgagtgaagttgaagtcctagggcgtgactgcgcactactgtagattttataaacactggacacttaggctacactacgagatatatatttctttttctatagaattataaatcttttttaatcaatatatttttaaagtaactgtgccataacgttacaattgttatgtcactgggctaggcagtaggtgtctttcggccccattatagtttcatgggtccaccactgcacatgcggtctgggttgatggaaacatcatttcgtggtgcatgaatggatttttatgggagagcaggatgatgagctgaaagagggaggcaatgggaagcaaggaggacctatcctgctcaggcccagggaagggctgcagcagaggacagcaaggcagcagtgtcctcaggggatcgggcctcttacagcaaggaagaaaaggaagagttccctgaggctgctgaaacccagagggctgctggtgctggagcaggattttgaggacatgcaaaagggtttcagcaagggagggagggaggaaggaactggggagcgagggtcagcccaagataaccaggtctctcccaggaatcttctggccactcagaagtagtgctcacacccagttgagcccacaaagggcacccgtgcccagcgtgagaacctggtctgcctattgcccagccctgacacagcccagccattgctggcacctgctgtagcccctaagatggatcagcctggtcgggtcctcaacagccctcactgaggcaggtaaaaacacaggcacctgtgataagaggcaggcagaggcaagtcacatagtagtgtcagaccaggtgctgcaggagcccagtcagaagggcactgaatccaggcaggctttctagaggcagtgactcaggatttgtgttccagttgtgatggtggcacatccaggaagcagcgcatggtccagctgggcacattgggactggaggctgttttttcgtttttgtttttgagacggagtctcactctgtctccaggctggagtgcagtggcatgatctaagctcactggaggaggctggtttttaatgagtcttgaggccaaggcaagggtcatgaccagggtccagcctcagtaatgcactcaccccttcaccctggggcactgctgcaggcccaccatcaccagcctacatttgctcccctcctgccctctctttccaggaagcccctcacctgtcacttcatgaagaatatggaagccaaggaggtcttcttcaggcattcttctccacccatgcacttcctccctccctgccagcttcaaaggcattgatgtccagagagaccctccccagttgccccacctttccgtcagcctcttccaggaaatgtcctctgacatctctctgtctaggtctccctgtcactctagtgcacaccaagactgttctcccttttcctgtcagccactgagtccactcagatatcttctgcttcccaaaattaaaattacaagtcaaaacagaaacagcttccatgtccttacacattgtagacacttggctacagcagtgaatgacatagacaaagtccctttcctcatgtagccctcatgctagtagggtgaaacagataataaataaactagtcaaatattcagcatgtgagttggtgatgagagcatggtggttcatgcctgtaatcctagtgctttgggaggccgagatgtgaggatggttgaggtcaggaatttgagaccagtctgggtaacatagtgagaccctgtatctacaaaaaataaaataaaggaaaagtgaaggaggatagaatgtatcagtgggaaagggggatgggagagccacattttagacagggtggtccaggaaggtatagctccaaccactattcctctggcccattccacatctatccccatcccaccccctgcacagtgcttgggtcaaagcctctcagtcctgcttgtatttctccaagagtgatccagggaccaactgcatcagaactgtggggtgaggtcatagcccctgcctgtgagaagtgcggattcctctgcccggaccagaatccctgggaactggacccaggaatttcccaagatctctggggaactctgagacagcccaaagtattagagctgcaggtttcctcctgaaaagggagcactgtctcaaggggtcccggtcacccagctctatcttgtagccaccagaccagtctcagccttggagaatgctgctctttcctcttggaatgcccttcccagtgttccttgcctggtagctcttacacatccctcaagacccaactcaagggctacctcctcctgacgtcactcccagaactttctcctgtgtttccactctcctcttcaccaagtgatgttgacatttctatgtgaccatctctctctctctctagaacagaaacgcctacagttgcggccccctgtagtgcaatttgtgtcagtctagggagagtggatttggagcccaaccaccattgaggaaaatccatctgacggacatggtgggtttcagcctagacacaggggtcagcgaggggtggtgtgacagtgagcacagaccctgggtggtggtgacagtggctgtcatggggaggaaaggaatggaaaagggacctcatgggagcagaaagacaggccttagctgcagatgggccaggaccccgccaggaatccagaacacacatcctaatcccagctccactgtaagtccacagcagaacccgggcaacgactttcccctttctgagcctcattttactcatcagtaaaatgatgacaataactccaacttcaccaaggagatgctaggctccatgagatgatggatcggaaaatgccttatgtttcatggcacaaaggagagggattcctgacatgtgacaagcacagggagagaggaagtgaggggtctgtaaatggccaggtggcagccccacccctccacacacacaaacacccatcgtgtcacccacactggtgattttcccaggagggcccccggcctggaattagcactgccaggtgggcagggaggacggcagtcccattacaggggtgaggaaacaggctgcggatggtcgcacagggaataaggagcagggtctaactccccactgcaggcagggaagattgaagttgctccctgggaagaggaagggaggcattgactggcactccgtgatttagatgagaagcccaggctcggcccagtgacttgagcttcctgatgtagaaggtgaaggatgcagaggaggcagagggcaggaggaagaagataaggaagacagcagcaaactggagtcactacaggacactagctgctccaggctgctctgtcccattctaagagaaaaggaaaagtggaagaggggatcacagatcatgtccagattcctcactggcatacctgctgctatggaaacatccctgatggtccaggtttgtggtgggagagattgcaacgctctgcttcctggaaatctgtgtttacatccaacacagttgctgcctgagacagctccacctgaagaccccagagctgccccagcttgccaggcttcccctcctcctgttatcaccccatgctgctgagaacctgcctggcaggcttcccagccaaggctggggcctaatctcaagtgaaactgacatgtccctgtgaggactgaggaacatcctctctccccacagagcctcactcaggttctcatctacttccttggggtttgccccgcctccctcaggagtttggaaccacatactgttctggaggggacctctcactgctgcagaacctgtcctccaggacacccacaagtgttcatcttggtcatggctaattaacttaccatatggtagtgaactacattctggggccccaatattttgtttattttttaaaaataaaattagtaccattgtttattttctgaatgttcagaaatatttgtctgattattatttacatgccctttgggaaaactttataaaataaaaaaatatgaaggagaatcttaccacacagagataatcactttaattatttttctattcatatttgcacatacaggtacatatgggatcatgctctgtatctgttgggagtgcattaatctgaaaattcagtcacttaaacaaagacaggttcatttttcttacatagttagagtacctatggttcctggctatggttcactggttcaacaatgttaggcccagcatctttgtgagtctattggaatttagctcacggctgtaagacggctactgcagctccaaccactacatgagtttacaaggccagcaaaagcagtcacttctgtattcttattagaaaagcaagaacttcagaggtgacccccagaggatttctctttaggtctggaaatcagtttagattggccagaacctgatctcatgaccatccctagcagtagagaatagcattgtcatgattgactttggatcaatcataatttattgactgagagtgcacatgtggtcccccaaagaagatcaagaaaggagggaatttgcagtctgtactacagcatgcatgctgttttataatctgctctttctcttaattgcatatttcaaacatctttccatactaagaaatatagattcagtcattcatttaacaacaaattattgagagtgtactctgttccaggaacttaacttggcatggaggacacaataatgaacatagtatactccttgtctccatggagcttagcatctaatgagggatacagaaattcatcaaagaggttcacaaagaaatgtaaaattacgattgtaatttgtgctgaaaaggagggaggtgtgtggtgtgtgagagcattgacaggagatttgactcaatcaggagggtctgtgatctgaatggccataagccagccccttgcctagctgtagcacaattattgctgtatgtagtccaatctcttattgctggacatttacattcttcccacatcttacctactatcatcgatgcaacaataaatacccttcgctaagtaccacttggcacacttctctgattatttcctcaggataaatttctagggtaaagccaggcaccacggttcatgcctgtaatcacagctactcaggaggccaaggtggaaggatcactctggccagtagttcgtggccagcctgggcaacatagagaagtcttgactcaaaaaacaaaaatcctagaagaaatgaacaattcttagatgtcgaattgccaaatcaaggggtgcaccatcaccatccccatattcaccatcaccatactcattatcatcatcagtctcaccctcaccattctcaccagcatcagcagcagcatcctcaccttaactatcagtatctatcaccaccttcactatcaccatcctcaccatcaccatcatcttcattatcaccatcaccatcctgaccatcaccatcattaccacctcatcatcaccatccttaccatcactatcaccacgctcaccttcacctttctcaccattctcatcatcatcctcagcataactatcactatcattatcaccaccttcaccatcaccttcctcatcatcaccatcattatcaccttagcatcaccatccttatcatcaccatcaccatgctcaccttcaccattctcaccatcatcatcctcagcataactatcactatcattatcaccaccttcaccatcaccctcctcatcaacaccaacattatcactatcactatcctcaccatcatcctcaacataactattactatcattatcaccaccttcaccatcaccatcattatcatcatcacaaccacaattatgaaaatcttggaggaaaagaagaggaggtagcatattaaaatacaggtactttgatgggaaggaacaggcagagttgaagctggggaggggatatcaaacaatggagacccccagaacagaaaactaagaagctcaggctttgcctagaatcagaggcatccttggagatttatcagcaggagagtatgcagtcagatttgtgtttcggcagaacattgagcaatctgaccaggtctactttcgaattttaatgagataatctgggtagaagtgctggtgctctgccagcaacagcaggtacttctcatatggtaaactggaactgtcttctcagttcctacagccttggcttcaaattctgcctaatccagatgaccactgtctctcacctgagcaaagaagcctcccattggtctcgctgctccagaccttcctctttccagatatcagcctgataatcttctcactgcaaacctggtcatgtccctcccttgtccctttgactaaagggtaagatccaaatcccttaacataacaccccaggcactgaggagctgagacccctccatttccaccttgactttttcccctccccctgtagtagcattgctgacccacttgccttgttctttcaccacaaggctttgatcctgttactcttctgcctagagggtcttcccacatcttctctgcctggtgaatttctacttaacctacaaagccaagctcaccttctctgtgaatcctacttccttcccattatgccgcaaattgtctctctcactagacctccagcccctaaaaatcagggacagcttaatgcatgttggaaatggctactcctcacttaattaccctaattagctagttatattcccttatatttgtgtttccccatttactgaagctttccacgggccaggcactgagatccaggggaggacccggagggtaggacaagcatgagtactgaaggctacaatggcacaggcaccaagaggccatgtggagtgcaggaagcctcatctctagagtgtcttcctggtttaccatgcgctttcttctcttcccttattggagtcaccttgtgctggttttgatagcctgtgtccctgaaacatgcactcccccacacacaaacagacccacatctatccacaggtaccttgcccatacatagagagacctctgtgtgtatcccccagagctacaaatgccaatcttgagaatgaagattttgcaagtgctctgtgccaggcatgatgccaggtccttgacaacacaagacccctctggtttctcccactcagctgtgcaaggttcggggttgaggagctccccctgccaaggtcacagatgtgaaacatgaggtaacagctatttgaatgtaagcctgtaggtcaccaaaacatatgccatctgcaccccaccacagtgcctccaaagcacatgaagacatgagtctatcaactgtgactcattagtacccagcaatatttcctcctccacttcgtttctcactgccactccagtatctctgcccacagtcccagagccacctctgcttaacggggaggtcaggacagatgctccgttccacccaatgccatctcccagggtgcagcctcctcacggggaagaggactaccatggctagtggtgacatgggtggctctggcccccaggactcctccccggacctctgctcaggacatagcatggacagaggtgagggtaccataaactgcctcggaaatgactacaaaccagctcagaccatttcagcacctaacacgctgacagctcagggtgggcccacagaaggggaagggctagggagtccagggctgcaagagtcccccctccctgagcccttgagcacagccacccaggtgtaaaggacaatatgggggttctggggattcccaagcctgggccctagaggtgagttctagcagggcccccagatatcctccccatccatcccctcatcctgtctcacatattctaaaaacaaggaaacaggcctagagagggaaggggcttgagcagtctctcaggcagttagagacagagcccaagttagaatccatgtttctctcccttttttcccctaggtctgtctctgactagctacgtgacctttgaagaggcactccacctctctgggcattgaaggtttacaacttctgacatgttcattccagagggttgtcaggacctgacagcccttcacctaaacaaaacactctacagtctacaaatattcatatatctcttctcttctctgacctctgtaatacctctatgaggctgtgaaaattggtgcttgtgtcctattatgcagatgcaaatactggactcagaaagacaaagaccacacaggaagtttgggacaggactggaactagaacccaggtctcccaaagcagggtccttgccatcactaaggctaggaatacatttagactccaaaatatggagagttgctcaatgtatgccacccaggttagagctgaccaaccccagaatgctcagcagctctgggaccctggagtggaggactcaaggcagagggtgatgcctaagtcacacacatctgagctccaatccaaactccactacacagctgtgtgaccccactttacgaggctcagccttctctactgcaaaatgaaactatagaaggtaccaaaaagctcaggatgaggggagaactgcaccctgaatgcaggactgccaggcaggtggtaagcactcattaacttttgtttcaagcacacaaatcatacgttgtttttcatcatgtctccccatggtgtctggtctatggctccagaaccaggaggcttctgatcaatctttatgctaaatgatggacagatagatggatgggtggttggacaaataaatggatggatgcatggattgatagattgatgctgagatgaatggatgaatagatggatgaatggataaatgaatggatgggtgctcagaagagaagaaagaataaaacagtgagtcaaaatgaaaagaacaagaagatgattgaaggatggggctgaaacatggaagagaggtacaagatccagcccttctggctccactcagccccacagccacataccttggggtagcactggcacatgctccagattatacccctggacaccatgatgctgccacagaaggtttcattggactggggcccatcatggctcaggaggaatgtactgagagccagaagacccatacattgaagctgaagcggaaggtcttctcatctgccaaggtctcctcacctgccatggctgccagcatgtgcacctgtgcacccctgtgcacccctgccagaaggggcccatgccatccagcataaacatccagacaggctcacaggaagagatgaagctcttggatcactgcaaataaaggcttaaaggtaaagggagggcaagaccccttcagctccaggcctattccctggacccaccagttcagcagggctggaggcagcatgctttggtggaccagtgaacccaatccccaccctctctccttcccttggggcccagaaggcctggagtgcatgtgtgaatctgggtgagggagcaggcaagggagggacaaggggaggttacaggggctgggccccaggcaggcctgtgacaaaaccttctttgcctactttggggctgaactgagtaagcagctgatcccacaccttctaggcccgggaagcagggtacaattctgcagccaaaatatgttagaatgctgccagaggatttcaggatcccagtgccaggcatttcaggatcctagattttagacccttcaaggatatgtgtccatctgggattcaggcatgatagcccatacgtactggatggtgacgatgtgcatggcaccattctaagcatgttacagctattaactcacttaagggactccatgaggcaggtattgctatacccactatgcagagggcactgagcacagacaagtaacttgcccgaggtcacacagctggaaatggtagagaagctggaacatgaacctagaagctgtgcccctggccacagggcaatcctgcttaacggcagcacgaggttatgggtgagagctctgatggcaaggcaggctgcctgggtttagatcctggctcctgtactgcgcggcagcatggtcttgatcacattacctgcctgtgtctgtttcctcctctgtaaaatggggataataacggtacctcccagcattagcgctatctccaggcctaggtgtcctggatccttctgccccctttacactctgtgcagcatccaggcctgcttgtaatgagctcgtctactcccccaccaaagctctggtgaattaatgtccctgtggggtataagtgactgacagtaacttcctcaatctccttgcagcctaatctaagaagatgccttctaaagaatagcattctaatgtgaaattttagtcctgtgaaaggctaatgggagaaatcagattccaagattacagaaaaaacaggacgatgagtatctctaaaagaaaatgttcacttgtagtatcgatggggttaggtggccgatacaggatgaaaggctttcatttggctccctgacttgctgggtttggggatttccctggtcctggtcattacctctttcctcctgcccagcatgtgctcacaccagcccctctgcctcacagtccttcccacaggctctttttcttacatttttttagagaaggtaagctcagagggacttttaatatgccaatcgatgttaataaaatataagtcaaagacaagtgcaaacatgctttcaaccaacattaatgaggaaacgacacaaattctttttctttttataatttattttatttttgagatggaatctcgctctgtcacccaagctggagtgcagtggcatgatctccactcaccacaagctcctcctcctgggttcacttcattctcctgcctcagactcctgagtagctgggactacaggcacctacaaccacgcccggcaaattttttgtattatagtagagatggggtttcaccgtgttagccaggatggtctcgatctcctgacctcgtgatatgcccacctcagcctcccaaagtgctgggattataggttgagccactgggcctggccctgtttgttcttttacattaactttacaatgtatttgccatgttttaaaaataaatttaattggaattttattgaaattttatgagacatgatttagtcaaagatgaagacacaacattattattactgtttccatctagctatggcatatttcttttttttctctagttgtcttttatatcactcaataaaatttgtggctctggtacatttcataataatcatacattatatttcattatttctaattattataatggatcacatgtacatttactatgtaccacatattatgagataatgaatatattcattatctcaattcataaaacaatcatgtgatttagttggtgttattactagattattaccattgtacaagtaaagaaaataaagacaaaaaaaaaaaaagaaaagagactcagcaaaatcaaaccaataaagacttaatcagaattgttgggcatataataaaaatttaatacaactcaatgaaatgaaaaaaaacattttaaaaaatgaccaggcagatttgagaaggagccaaacagaagttccagaaataaaaacataattgttgaaattgaagacagatttgacagcagcttacatataattgaaaaggaaaatgtaaactggaagacaggctgaagaaattgctcagaatgaagcccaaagaagtaaaaagtaagaaagaaacaagagacatggaagacaagaatgataagatgttacaactaacaggatttcataagtagaacaataaactgttagaaaggttttgtaaaaaagataatagcttggaattttcccaaagtgatgaaaaactccacccttcatattcaggaagctcaatttaaaagggaaaaaaaaatcacctaaatgtatcatcataaaaataacggaaccctgaagaaaagaatatattgaaaacaaacagagagaaaattcacattatccatgaaagaatatggatttagaccaagagctaatgtcttaaaaatggaagcaaggagacaatgtactaagaaaaaataatcacatacgaaattaatatatcttttactaaacaggccaaatataagacaatatttaagtcataaaaactaaacaaatactgaatttgctaactaaaagaccttcactaaaggaaattctaagagatgttcttcattagaagggtgttcccctagatggaagacttgaattgcgagaagaaatggtgagtacgtaagaagacaaatatgtgagtaaatataaatgaacattgactatacaacatgtagtttccagtggattaagaataagatgagaagcaaaaccataaaacttctaaagataatatagtaagactaccttaatagtcccagtgggttttcatataaaacctaaacaaattctgttcaccaaaaaaacactatcaggatcaaagacccaaatataaggggtaaaactataaaatttgtagaagaaaacataggtataaatctgtgaccgtgaattagtcaatgggtcttagatacaacaccaaatgcaagagtgacaaaaggaaaaaacaaactggactttaacaaaattcaaaacttttgtacatcaaaggataccatcaggaaagtgaaaagaacccacagaatgagagaaaatatctattaagtcatacatctgatgaggaactaatgtccagaatatataaagaattcttagaataacaaaaagacaacccaattaaatgagcaaacagtctaaatgaacatttctctaaaaagatatacaaatggccaatcagcacacgaaaggatgctcaacatcattagtcattaaggatatgcaagtgaaaactacaactagatacaacttcacatctacaaggatggctatatttttttaaaaaacaaaaataacagatgttggcaaggaggtaggaaaaaatggaacctccataaactgctggtaataatataaaatggtacagagactttggaaaacagttttgaagtttttcaaaaatttaaacatagatttaccataggtccactcctagatatataaagaaaattgtaaaaatacgtccagacaaaaatgattacatgaatctcatcacagtacattattaatcatagtaaaaaaatgaacacaactcaaatatccatcaactaatgaatggataaacaaaacatagtatactcatgcaatgggattcaggcatataaagcaatgaagtgctgacacaagatacaacatggatgaatcaggacaacatgctaaataaatgaagccaaacacaaaaggtcacatatgattctgctttttctgatatttggcatatgctagtccatagagacagagaatagactagtggttgccaggggctggggaaagggggaaatggggagtaactgctagtaagtatggagtttctttttgaaatgataaacatgttctagagttagagagtggtgatagctgtacaactgtatgaatacattaaaagcacttaaagcgcctgcagtcccagctactcgggaggctgttgcaggagaatcgcttgaacctgggaggcagaggttgcagtgagccaaggtcacaccactgcactccagcctgggtgacacagtgagactccaattccagaaaaaaaaatgcacttagtgtacacttaagagtggatactgggctaaaagtgaagtgacaggcctcaaactaggcaaatcttctatacacatatctgacaagggacttcaggaaatcttaaaagtttcaatgatgaaataggagactatagacaaaagacttgaacaatgcatataaggaacccaaataacccacaaataaatgaaaataagctcagcctcctttcaaaccacagaagactatttcatattcaactgaaaaaaatgatatcaagtaaaggcaagaatgtgcacaaaccagtacccacataagctgccagtgggaatgtaaaatggtgttacttcttagcaaatttggtatcatctattaaatagttcactgtgcataatcttggggccaagcactgccattactgggcacatgcaacggaaaatctctacatgtgaaccaaaaaccagcaccatcgtttgtatggattataaaaaaaatcaaaaatagaatggacaaacaaatttcactctctacaatcatataatcagacagtgcagcaaggaaaatgaatgaatgtaagaaaaccacaatggtagcaaaaaacagcaagtcagaatatataaggaatgattccttttatgtaaagtttcaaaatatggaaaactcaaaaatatcttctgtagggagaaaaacatacattcttagaatatattagacgaagacttttacttgtttctttttcagtttaaggatctgctgttctacttttgcaatttctcgatctacacgatccatacactctattaactcttcctttgaaagttttgaaggtgaagcattttgatcatctccacacggttgccccagaattggagaggatggagcttcatgtttgcctccaaatgctggatcctttagagaataaaaccaagaaaaacaattcatttctcactaatagagtccagattgccttaaatgaaaaagtcagttttaaaccacagcagagccatgtgtactatgtgtctaatgaaacctttagtagtaactttcatatttacatatatgcaaattctcacctcacttttatagtttagatataccctgtactattttgaagagcctaaaagctatacaaagtcaggtgagttagtgttgatcagcctctagtgtaacaatactgaaattatagagaatttataggtaaataatgcaatcatgacaaaggaagataccaacttctcagccatttccttgcaatggctcttcaaatggtctgaacaactagctgggaaagagtattattccaggtaaaacttgtgtgtccacccaacttaacaactgtaacatggccaagtgttcctatcaaaagttttcaggctttccaaaccaaaagtgaggtacacaagtcagagaagtgacctgggaacttcagctgctactatctctgggcctactttcataaagcccacactacagcatacgtaacatttccttagccaaaaacatcccattgcacctccaaatcagcagagctgtagcagaatgaaagccccttcacccaaaatccactaccctccaacacacatccacacacaccctattaatttccagtctgctgtaaagatataagcaatattatgaaacagataaattttagagtactaattttatttagactatgagaaacctacaatgagggtggttcacaggattacagaaccctaaaatgtattaaataatgattaaggaactgtgaaaagtcaatagttctgagccaagaatgcatacaggagataactggacagttgcttcaaaacactttagtacagatatttcagctagtatacattgatgaaaagcctcatattctctaatagtatgcactgaatctaagaggccttctgggaaaataaattatggctataccctaaaacctgaaaaattctgtgaggaaagcaccaataaaagcaataacaattctaataaacttaatagagttaaagctccagtatcctttgcatctggcatacagtcaatctttggcagctttaagccctacagtttatgtccctctcttaagatgtaaatccgtgaggtcattggcttccaaagtaaaccagtacgtttcatctaaataaaatatcagtggccgggcatggtggctcatgcatgtaatcccagcactttgggatgccaaggtgggcagatcacaaggtcaggagttcaagaccagcctgaccaacatggtgaaaccccatctctactaaaaaatacaaaaattagctgggtgtggtggtgggcacctgtagtcccagctactcgggaggctgaggcaggagagtggcttgaacccaggagggagaggttgcagtgagctgagattgcactactgcactccagcatgggtgacagagcgagactccatctcagaaaaaaaaagaaaaaaaaagtcagatttggcatataaccatctttatcaacctctttttctccccctccctcctttatcaacgttaaaaaacatacaagaaaatttgtcttcacattgtcttttcagtgctcgaatcttcactaacactatgaaaagcacaacagttcctaaattcactaagtcagttactacttgcagtaaatgaaaactaaatgcagaatgttcaaatatttttaagtcttcatgtgttgtgaagcctttttctttcattatgagacagcgtacttctgagaacttagaaatgttaatgcataaagaaagatctttggtgaaccaccaggactttcatgatacattaatttcattctcccactatatgcatatgagtaaatttgtgttacagaaacatatataatagcaaaagagattacattttgattcagcagacttcaaaagtgctcctcaggtgattctgatgcatgcccaaagaattaatattacaaatgaatattttccactgaattcctttctaaatattaattatttaataagaaaccaaatcctcaagtgcctacttatataacaggaatagggtggtggatcaaaacagacaagatatctgccttcatgaagcttacaatcttgggttgaaacagccagataccaatcctgaagaaaaagaattagattcttacctcatatcttacataaaaaaaagccaagtaacagcaaacatttataagaggcttattagcaaatcacaaaaagcctcaagttaaaaaaaaaaagaatacattatcttgggttcaggaaggccaaaagcaaaagatataaaagacattagttttcaaaaatgaaaaattgatggataaaataaaaaacagtcttctgctcagcacaatggctcacacctgtaatcccagcattttgggaggctgaggcaggcagatcacttgaggtgaggagttcgagaccagcctggccaacatggtaaaaccccatctctactaaaaatacaaaaatcagccaggtgtgttggtgtgagcctgtaatctcagctacttgggaggctgaggcaggagaatggcttgaacccgggaggcggagattgcagtgagcagagatggcaccattgcactccaacctgggcgacagaggaagactccatctcgaaaacaaaacaaaacaaaacaaaacaaaaaaacccacacatgcaaaaacacaatcttctgcttatcaaaacagtaataacaaattaaaaaggcaaatgattaaataggaaaaccattgcaaaacatgtactctaacaactcaatataaaataaaccaacagaaaaatgggaaacatatatgaaaaaataatttacaaaacaagaaaaataaccaataaacaaaaaaatgttaaattttactaacaaataagtataagttaaaaacaatcatcaaattaacaatctttttgttaaacaataagcgtggtgtcagcaaggatacagaaggagtgggtacctttatttatttttatttttgttttttattttttgagacaaagtctcactcttgtcccccaggctggagtgcaatggcgcaatctctgctcactgcaacctccacctcccgggttcaagagattctcttgcctcagcctcctgagagtagctaggattacaggcgcctgccaccatgcccggctaatttttgtatttttagtagagatggggtttcaccatgttggccaggctggtctcgaactcctgacctctggtgatctgcctgcctcggcctcccaaagtgctgggattacaggcatgaaataaataaataaataactatatttaaataaagttatataaataactttaaacagtgaactttatttattcatatgtggaattctaagtagccactaacaatacagttgtaaacttattggcacaaaaagaagctaagcacgtatttaagcaaaagtaaagttaaacagaatgtacaaagtgagcacattaaagtattcatacgggctgactctggacacactgcctaggggttagccctgttccacaaggagcagcagaaaaaaaaaaaaaaaaaaccataaatttaaattaaattcaatttaaatttaaatcatacacacacaaatagggaagaatcaacatgaaaatgttcataacttttaagtggtaaaactgtaggtaatttttttctttcaagcttatttaactcttctataaatgatatacctaagcttaacattaaaaaaaaaatctaacaaatgttagttctttttaaatccttacttctggaggtgggcagttgggagagaatggggagagggagatggaaagagaagtattagttagtagtagtagtcatggtttacactttagaggaaaaaaagcaggactagagtcaggggtcctgggttaattccaactcgggaggtactatctaggtcacttaatttttctgaacatccagtttctcaactataacatggaaatgcatcacactacaacacaacacgtctcattttaatgaatgagtttttaagacacttttctgctaaaaaacgaaattctataaattacatttgtggtaatgtattcagccatggaagatgacctttattcactatatttttaaatttcttttttttaatgcagcagaacatttcttataaaccccacagactactgtatgataaaagatatttcacatgataaggtgggtcacaaaacacctagaagcttagctaatttctagcttacggcaaagaatttttccccatccaacttactattccaaaaaatttcaaattcacttaaaagttgaaggaacagtatagtggacactcatttatccttcatctggattcaccagtagttaacattttaacatatttgctttctgtgtgtgtttgtgtatgtgtataaaacttcattttggctgaactatttgaaaataaattgtagatacatttattatcttttaaattactcttcattgcctgaaaactcaaagaaaatgtgggggtacttatttatttgatatcagggaagaaagggcaattaggcataaaggttaataaacattatagaaaaaagatttgatggcagtaaaaacattttaaacttcagtatgcttaaaaaaaaagaaaaattgaaacaaaaagacactgggaaaaatattagaatatgttaggcaggcagatcacttgaggccaggaattcgagaccagcctggccaacagagtgaaaacttgtccccactaaaaatccaaaaaattagctggggccgggcatagtggctcacgcctgtaatcccagcactttgggaggctgaggcggatggatcacctgaggtcaggagtttgagaccagcctgaccaacatggagaaaccccgtctctactaaaaatacaaaattagccgggcatggtggcacatgtgtgcaatcccagctacttgtgaggctgaggcgggagattcacttgaacccgagaggcagaggttgtggtgagccaagatcgcatcactgcactccagcctgggcaacaagagtgaaactccgtcttaaaaaaaaaaaaattagctgggcatggtagtgcatgcctgcagccccagctactcaggtggctgaggcatgagaattgcttgaacccaggaggtggaggttgcagcgggccgagattgtatcactgctctccagcctgaatgacagagaaagaatgcctcaaaaaaacaagtagccacaggggggaaaatgtgttttatatattaatgaacaaaaattaagaatgaccacaggcttctagtcagaaaccatacaagccagaatacaatgatatgacatctcttaaaatactgaaactgtcaacttagaattctatatctagtgaaaatagtcttcagaaataaaaacattttcaggcaaataaaagctgagagaattaattgccaaaagacctaaactgagagaaatgaagtgcttcaggcaaaaacacaataatatcagaagaaaacctgaatacaaaaaagaatgaaggatgtcagaaatgatatatacacaggcaactagagaaggaaaaaaacaataaagagtagaaatcagtgaattagaaaaatagtgaaaatgattgaaaccaaagctagttcttcaaaaatctattaaactgataaacctctaggcggactgattaaaaaataataataaaaattatcaacatgaggaacaacatcgcaacatatctcaaaggcactgaaattatgaggaaatattgtgacaaattatttcaataaatctgataccttaaacaacaaaatatacccaaactgactcaagaaaaaattgagtgtctcaattataactattaaagaaattgagttcatatttaaattcttcccacacaaaaaaattctgggcccaacagtttcactgatgaattctatcaaatatctaaggatgaaaaaatatcaatcccagccacacgtggtgggttcacacctgaaatcccagcactttgggaggctgaggctggtagatcacctaaggtcaggagttcgagaccagcctggccaacatggcgaaaccctgctaaaaatacaaaaaattagccaggcatggtggcgggtgcttgtaatcccagctacttgggaggctgaagcaggataattgcttgaaccaggaagaggaggttgcagtgagctgagatcacggaattgcccactctagcctgggtgacagagcaagactcaaagaaagaaagaggagaaagaggagagagagagagagagaaagaaaggaagaaagaaaaagaaaaacaaagaaagaaagagaagaaagaaaaaaagaagaaagaaagaaagaaaaagaaagaaagaaagaaagaaagaaagaaaaagcaagaaagaggccaggcgcagtggctcatgcttataatcccaacactttgggaggctgaggtgggaggatcacttgagttcagaagtttgagaccagcctggccaacatggtgaaaccccatctctaccaaaaaatacaaaaattagccaggtgtggtggcactcatctgtaatcccaactactcaggaggctgaggcagtagaatcacttgaacctgggagatggaggttgcagtgagccgagatcgcaccactgcactccagcctggatgacagagcaagactccatctcaaagaaaagtaccaatcctacacaaaccccttaagaaaacacaggagtaaagagcactctccaagctaacatcattcttaatgcagaaagactgaaactcaatgcttaccacaccacatataaaattttaattcaaaataggtaatttacctaaatgaaagccctataattataaaacttagagaagaaaacataagtgaaaattggtcgggcgcgatggctcacacctgtaatcccagcactttgggaggctgaggcgggtggatcacgaggtcaggagattaagaccaccctgactaacagggtgaaacctcatctctactaaagatacaaaaaaaattagctgggcatggtggtgggcccctgtagtcccaactactaggtatgctgaggcagaagaatggtgtgaacccgggaggtggagcttgcagtgagctgagattgcaccactacactccagcctgggcaacatagtaaggcttcatctcaaaaaaaacaaaaacaaaaacaaaaacaaaacacaagaaaaatagaaaaaaagaaaacgtaagtgaaaatcttagtgaccttgaatttggcaaaaacgtcttaggtttgacgcaaaaagcacaaaaaatgaacaataaaaataatacattgggactgggtgcagtggctcacacctgtaatcccagcactttggaaggccgaggagggcggatcacctgaggtcaggagttcgagaccagcctggccaacatggtgaaactccatctctactaaaaatacaaaaattacctgggcatggtggcacaagcctgtaattccagctactcaggaggctgaggcaggagagttgcttcaacctgggagtcagaggttgcagtgagctgagatggtaccatagcactccagcctgggcaacagagcaagactctgtctcaaaaaaaaagtacatcggacttgataaaaataaaaaatgtacgctctccaaaggatactgttaagaaaatgaggcaatactttttttttttttgggaaaagtggcttaatttctttttttttaacttattattattatactttaagttttagggtacatgtgcacaatgtgcaggttagttacatatgtatacatgtgtcatgctggtgcgctgcatccactaactcgtcatctagcattaggtatatctcccagtgctatccctccccactccccacacaccacaacagtccccagagtgtgatgttccccttcctgtgtccatgtgttctcattgttcaattcccacctatgagtgagaatatgcggtgtttggttttttgttcttgggatagtttactgagaatgatgatttccaatttcatccatgtccctacaaaggacatgaactcatcattttttatggctgcatagtattccatggtgtatatgtgccacattttcttaatccagtctatcattgttggacatttgggttgattccaactctttgctattgtgaataatgccgcaataaacatacatgtgcatgtgcctttatagcagcatgatttatagtcctttgggtatatacccagtaatgggatggctgggtcaaatggtatttctagttctagatccctgaggaattgccacactgacttccacaatggttaaactagtttacagtccctccaacagtgtaaaagtgtccctatttctccacatcctctccagcacctgttgtttcctgactttttaatgattgccattctaactggtgtgagatggtatctcattgtggttttgatctgcgtttctcctaataatctagatacaacaaatatatagatatatgttttctaagtaattttacctataataatcaaaaactggaaaagttgaccggataaaccaattgtggtatacccatactcaacaataaaaaggaatgaactgggacattccagacatggatagatagcagaagtattatgggaagcaaaaaaggtcatagacaaaagagttcccatgaagctcagaacgtatacaatgatttatgatagaaagcagatcagtggtttcctaggagctgaggttagtaggaagtgggggaggaggactgacatgggtgggtgtcaaggagaatggggtgccaaggaatgtgctggagtgttagaaatgttgttcatcttcattttggtgatggttctatgagtttatgaatttgtcaaaatttgttacaatgtacacatataatgagtgcattctaatatagatatatgtgtatatatataaactaaactgcaaagttaattttgtttttttaagatggggtttcactcttgttgcccaggctggagtacactggcacgactttggctcactgcaacctctgcttcccgggttcaagcgattctccagcctcagcctcccaagtagctgggattacaggtgtctgccatgatgcctggctaatttttttgtatttttagtagagatggggtttcactatgttggacaggctggtctcaaactcctgacctcaagtgatccacctgcctcagcctcccaaagtgctgggattacaggcgtgagccactgcgcccagcctgattttatgaaaaaaacagcagcaacaataatccggaaaattggtaatcagatgagtaacaccagggtagggggacaacacaagcaaaaatcaacacccaatcatgacagaaattctcaaactaggaacagaaaacaacctcttcaaccaaaaaaggcatcaacaaaaacgtgcaactaacattacacgtaatggtaaaagactaaatgcctccctacacaggaacaacaagaatgtccattctaactctgtaatcatgactacacttcaaaggagtcctcagtaggaccccgtagtacattttgatgacaaatctgctttcttagtctctgagatgaccgttttatcccatcctttcctatttttctttaaacctcttacacccatatccttggtctactctgagatgattatttcacctcatactttatttttcacaaggtaaatcaatctcttacaaactcttcctatgataaagtcttccttcctatctaccatcccttccttcctacctactatgcaaatcttcctaccatcaatctctcaagaagacagaggtctatcctggccatcactcaagacatgccaagttatctggccagcttaaaactcaaccacaacttgggagtataaatataggtcttaccctagaaattctagagaattgataagttttccatttatcatcaactcctttcatcaaaagcaaagacaagttcaactcctcaaattggcataaagccacagtaggaagacagaaataattaattcccaacctttggttcctcatctttgtaaatagctcttgccatttaaaaaaaaggtaaatttggtggtttctaccaacatgtgtattaaataggaaaagtaaagaaaaacacaaaaaacatgtgcaatttgcatagtatttgttccttacctgctggtggtgggtgctgggaaacgtatactttacagagtgaggaggataatgactttgttctgtgctgaatgctccttggttgggagggtaacctgaacttgacattatcagtaaagaagtcctcaccagactgtgagatcaatgccaataaacaatcatgtttctaggaaaacatctaaacaggatgggaaaaaaatagaattaataagaactaaaacaccaagtgtacttctaataaattataactatagctacataaataaaaccacaattaccagtaaaagcttcctctcaagtatttacttaataaaagttaccaaggtttgaaaacattaatgtgtcattttttatatttaaaataggttaatatgtgacaaataatataattagctatataaagtaaaaacagtatataaaaacagcataatatctggcacatagtaactgctcagtaaatacctttctacaaatgtctgaggaatataaagacaaaaatacatggttttaaatttgggagttgataagtcaattgtgaaaagaattcaagagtagttttaaggtaagcatttgtgcagaggaagtattgtctttattaaataattctgaagcaaggatgataaaatactaagttttgtaatcacagatggtaggtagatggacatttgttatgttactctttgcatgcttctatggaactgaaatagcagataaagaaaaagaaggccagaagcggtggctcctcctgtaatcccagcactctaggaggctgaggcaggcggatcacttgaggtcaggggttcgagaccagcctggccaacatggtgaaacttcttttctactaaaaatacaaaaattagccaggcatggtgacatgcacctgtaatcccagctacttgggaggctgagacaggagaatcgctggagcctgggaggcggagtttgccgtgagctgagatcatgccattgcacaccagccagagcaacagagtgagactccatctcaaaaaagaaaaagaaaacaaagaaaaataaagccatcttcattataaagtatattcctacttgtccactattctagattaatttgatttgtctgtcttttcttgtgccaatgccacacttttcaaattactctagtattacgaggtttcatatccagcagggcaagtttcacctcactgtgctttgttgttgctgctactttcaccaccttcccagctattctagcacattttctcttacacacaagcatcagagtcagcttgtcaggtcccagagaaattctggatgagaacacataaatattgaattcacagactgactaatgggagaacaggtacccttatacgtctgagtactccaatcttaaaacatgattatctatgtttatgtttcaggataacacaaatatttatgttatacataattaatatgggaatattttacatacatgtggtagagaatattacacatatataaaaatgtgtgcaataatatataatttctatcttaattatatataaaactcccaagacaaaaattttatatacacatatacacatgtgcatgtgtgcacatacactcttactttaagaccagagttctattattacctaattgggtggttttaaaaaatagaatttaaatataagatgaaaattatataattgtatacataaaaatataacagatataattttatttacataaaatctccacccatttaatactttattagtaaagttttaattttctttccatcatttcaaggtatttgggaagagggcaaattcaaaaaataattcagtatgacaaattgatcaatttcccagtttttatcaatatattctttatccagttaggtttagaaaacaaaattttctaaggaattgtctttcaatctaactttaaaacaaaacttataggctggccacagtggctcacacctgtaatcccagcactttgggaagtcaagatcggaggatcccctaaggccaggtgttcaagaccagcctgggcaatgaagccagacctatctctacaagaaaattaaaataataataattattattatttaggtggccaggtgcagtggctcatgcctgtagtcccagcactttgggaggccgaggcgggcggatcacgaggtcaggagatcgagaccatcctggctaacacggtgaaaccccgtctctattaaaaatacaaaaaagtagccgggcgtcatggtgggtgcctgtagtcccagctactcgggagactgaggcaggagaatggcatgaacccgggaggtggagcttgcagtgagccgagatcgggccactgcactccagcctgggtgacagagtgagactctgtctcaaaaaaaaaaaaaaaaaaagaaaagaaaaaaataattagtcaggcacggcggtacacacccatggtcccagctacctgggaggctaaggcaggaggatcacttgagcccaggaggtcaagactgcagtgagccgtgattgtgccactgcactccagcctgggtgatacaatgaaagtctgactcaaaaaataaaagaaaaaatgtatagaaagaactttaaggccaggcgtggtggctcacgcactttaggaggccaatgcaggcagatcatgaggtcaggagttcaaggccagcctggccaacatggtgaaacccagtctctactaaagatacaaaaaattagccaggcatgatggcacatgcctgtaaacccagctactcgggaggctgagtcaggagaatcacttgaagctggggagtgggggttgcagtgagctgagatggtgccactgcactccagcctgggtgaggggtccagactccatctcaaaaaaaaaaaacaaaaaacaaaaacaaaaaaaaaaactttaaaaactgcatgtggtaccatgaaacatttaaatattttattttttttctttttttatttattaattattattatactttaagttttagggtacatgtgcacaatgtgcaggttagttacatatgtatacatgggagactttaacaccccactgtcaacattagacagatcgacgagacagaaagtcaacaaggatacccaggaagtgaactcagctctgcaccaagcagacctaatagacatctacagaaatctccaccccaaatcaacagaatatacattttttttctgcaccacaccagacctattccaaaattgaccacgtagttggaagtaaagctctcctcagcaaatgtaaaagaatagaaattataacaaactaactctcagaccacagtgcaatcaaactagaactcaggattaagaatcccactcaaaactgctcaactacatggaaactgaacaacctgctcccgaatgactactgggtacataacgaaatgaaggcagaaataaagatgttctttgaaaccaatgagaacaaagacacaacataccagaatctctgggacacattcaaagcagtgtgtagagggaaatttatagcacacaagagaaagcaggaaagatccaaaattgacaccctaacatcacagttaaaagaactagaaaagcaagagcaaacacgttcaaaagctagcagaaggcaagaaataactaaaatcagagcagaactgaaggaaatagagacacaaaaacccttcaaaaaattaacgaatccaggagctggttttttgaaaggatcaacaaaattgatagaccgctagcaagactaataaagaaaaaaagagagaagaatcaaatagacgcaataaaaaatgataacggggatatcaccaccgatcccaaagaaatacaaactaccatcagagaatactacaaacacctctacgcaaataaactagaaaatctagaagaaatggataaattcctcgacacatacactctcccaagactaaaccaggcagaagttgaatctctgaatagaccaataacaggagctgaaattgtggcaatattcaatagcttaccaaccaaaaagagtccagaaccagatggattcacagccgaattctaccagaggtacaaggaggaactggtaccattccttctgaaactattccaatcaatagaaaaagagggaatcctccctaactcattttatgaggccagcaccatcctgataccaaagctgggcagagacacaaccaaaaaagagaattttagaccaatatccttgatgaacattgatgcaaaaatcctcaataaaatactggcaaaccgaatccagcagcacatcaaaaagcttattcaccatgatcaagtgggcttcattcctgggatgcaaggctggttcaatatatgcaaatcaataaatgtaatccagcatataaacagaaccaaagacaaaaaccacatgattatctcaattgatgcagaaaaggcctttgacaaaattcaacaacccttcatgcgaaaaactcttaataaatcaggtattgatgggacatataaatattttaaataaatatatcatcctttctcctgatgtcacgtttcctgctgttgtgaaagctgaccaggagaagagtcagaagactcaccagctgtccctcagtctgttttctccctgctcccttccaaggcccgaggcatggaggtcagcaaatcttaaggattggaaggctgagattacccaactaacactgatttgacaggtgagaaacgtgacaatcagagaaagtcaataattcctccaatatcataaaattgtctgtggcaaaatgggaaaaactaatgttttctgtaatgctttgcagctttctcagcaaatagtgaactaggaggagctgagatgttcagtgagaccacacattaaaaccacctgaggagctgtctcctcatctatacatctgcaactgcttcaggtggaaggggaaaagccaacatgtggcattgtggggagggttgatctttttggaaataaacattatatgcaggacttaagagtttttaaaagtaccacagaatacaaagtgaaaaatctcctcacccttctcctccagctgctacccatttaccctcccagaaggcaaccaaagttactagtttctagagtgtcctttagaaatatcctacacatacatacactcacactttttcccctatgtaaatagtggcatactagaaacacactgttctgtatcttgcttttattacttaatatatcttggtaggctgggcgtggtggatcacgcctgtaatcccagcactttgggagactgaggcaggtggatcacaagatcaggaaatcaagatcatcctggctaacatggtgaaaccccatctctactaaaaatacaaaaaagttagctgggcacggtggtgggcgcctgtagtcccagctactcaggaggctgaggtgggaagaacccaggaggcagagcttgcagtgagccgagatcacatcaccaacctccagcctgggcgacagagcgagactgcatcccccaaaaaaaatacatatatcttggcaattattctcatgcatctatggttctttctattgctaaagagtatttcaccctatgagccaggcgcagtggctcacgcctgtaatcccaacactttgggaggctgaggcaggtggatcacctgaggttgagagttcgagaccagcgtgaccaacatgctgaaaccccgtctctactgaaaatacaaaaattagccaggcatggtggcacatgcctctaatcccagctactcaagaggctgaggaaggagaatcacttgaacccaggaggcagaggttgcagtcagctgagatcatgccgttgcactccagcctgggcaacaagaatgaaactctgtccaaaaacaaaagagtatttcactatatgaacgttcatgcattttataaaagttgtccaactaattctgatctgctgtcctaaaacatgctttaagtgatctatctctgcactctcctcccaactcagacatcccaaataaataaagctataaatggaatgcagagtcaaaaaaaaaaagattttaacccagggtcatctcatttttttctaacagtggcctaaatgattagaaacccatgaggtacaattttttaatgcacattgtttaactttcagctatggtgagtcctgagttcaacaattacactcaatgtctctcaaagtcacaagttaagtgacttctccattttttccctcatctcagtaatccttcctgttgtcctagttttgtggtatgactttaatggagtttaacattattatctcaaaaaaaaaaccaaaaaagtcagttttatttaaaagtactgttcgcccaatacagaaggaaaaaaaaagtaaaaacactagcaaaatcaggaaattagcccctactggcatacaaatttacaggtcaaagcaagcccttcctgtcctctcatgaactgcagcctggagaccactacaacctccttcctcaaaacttatccacgagatacatggcaagagtgctcagatgttgttttttaaccagaatgttttcctcaaaagtcttaaatgaaagctaaatgtacaaaaggtacaatggggaaacattctgatctagtgagaatgggagacctaggattcatcttttcagtctccccctgcccttccccatccctccctccacccttcactccagtcctggctcactaagatacctcggcagaatactttacatttgaaacccactgaaatgaaagaatctaaagttcagactgaaggggaagggagcaccttaagtggcagtatcaaattatgatttcagttcttagcaccaaaactcattaactcagggtagttacatggttgactcatgaactaaaaaaattctatgaattatttaagaaatctgatcaagattttatgagcaacttcctcatctcttacatatcaacacataatgttttaggatgagaataatatagtaataattatatgtcactgtcataaaagacaatagcacttctaactgaattatacagataaacccagaactagcctcttatatattgcaaacaggtaatacaatattgcaaaatgaaattgatctatttaagttcctttttaaatcttctcatattaaataaacacacacatatttactcaacaggaaaatcttgcaacaacaaaatttcaaatactatcctgccaaaaaacaagcaatttttcctctcagcaggaactcctggcttttggcccataacctttgcataacgaaaatatgttatgcaaaggtgttcaaggtggcctaaactaccttggaaaaaaagctgaaaatggccgggcacagtggctcatgcctgttatcccagcactttgggaggccaaggccagtggatcacaaggtcaggaaatcaagaccatcctggccaacatggtgaaactccatctctactaaaatacaaaaaagaaaaaattagccagacatggtggcacacacctgtagtcccagctactcaggaggctgaggcaggggaatcgcttgaatccaggaagcggaggttgtagtgagctggcatcgtgccactgcactccagattgacaacagagtgagaccccatctcaaaaaaaaaaaaaaaaaagaaaaaaaaagaaaaaaatgtacttcacagtggcaggactgcagatgccacttcagatgagcaagaatagatccaccaagcgtcacaatagaggtgaagcctacatttcaccaaagcagaaaaaggatcttacaaaatatgcaatttttaactgataaaataataaaacctcctgatacaaaagtatgggatagggcaatgtctctatgacattcaaatgctaaaatattagttattaaactgaagcaaattaggtcacaccagttcccacaaagctgtccagctctagaccaattctaaaattacgttaggcaagacaaggctaagaaagaccaccaccctgggcatcccgacacctaaaatcctccaacctagggataatttaaagaaagccgacctcctaaacttattactgagtccagcatccaggagaggaaagactagaaattatctaagtgaattcggtaatttgtacaagaccagagtggtgctgtactggaatgaattttctcctgtaaaataaactaaagcattcttccctttggggggaaaaaagctactgcttctcagccttttggttaagatctaatctgggggaatgccactgacaaggtattttatttgcagcctcttttgacattatgacatcttacttaaagacagagaaacaaatggaagctaaagaaaaagctttttagttaaactatcctacctcttataaagtatgatattgaaagaaaaattttaataagaatataattatttgataaatctatgggtacacatattcaataagtaattctggccaggcacagtggcttatgcctgtaatcccagcactctgggaggcctaggcaagtggatcactagaagccaggagtttgagaccagcctggccaaaaaggcgaaaccccgtctacactaaaaatacaaaaactaaccgggcatggtggcacatgtctgtaatcccagccactcaggaggctgagcatgagaatcacttgaactcaggaggtagaagttgcagtgagacaagatcgtgccactgtactccagcctgagcaacagaacaagactctatctcaaaaaataataataaatacataattcttaaatgaaagaaaaatgatgccctctacataaagcgctgtcccaagacagcagtacaatgtaacaatatccaactgtgaactgtggtatgtcggcactacattgaactaattttctgaaccgaacaacactcactcactcaacttctaagaacaaatatatttcaaaaccagccaagtgcagtggctcacatctctaatcccagcactttgggaagcagaagaaggtggatcacttgaagtcaggagttcaagaccagtctcgccaacctggtggaaccttgtctttactaaaaatacgaaaattatggctgggcatggtggctcacacctgtcatcccagcactttgggaggctgaggcgggaggatcacgaggtcaagagttcaagaccagcctgaccaacatgtgaaaccccatctctactaaaaatataaaaattagccaggtgtagtggcgtgcacctgtaatcccagctacttgggaggctggggaaggagattcacttggacccaggaggcagaggttgcagtgagcagagatcataccaccactgcattccagcctgggtgacagggtgagactccatctcaaaaaaaaaaaaaatacaaaaaattagccagtgtggtggtgcacaactgtaatcccagctactcaggaagctgaggcatgagaatcacttgaacctgggaggcagaggttgcagtgagccaaaatcgcacccctgcactccaggctggacgacagagcaagatttcatctcaaaacaaacaaacaaacaaaaaaagaacaaatatatttcaaaagcaaaatggatgactacatgccaattccttccctgtttaacacaaaataacaaagaaattgagataagaaaaatgttaatgtagacatttggcctggattaatagatgtaacaatatctaagtggatattactaaaagaattaccatttattgagctctagatagtgtgctctaggcagtgtgctaagacttggtgtgtgcatgagctcacctaaaaatctggttccactattagttctaaggctgtagggaagctacataacttcctcaagctatgtttttctaactcagagacagataccttaaagatcatctgctgctgcctcccctttgacccactaacagagactacaggttattaagcaatataaaaaggggttattaacgactctgttttttgctgcactcccctcaaaaccgccgagctccataaatcttaaagtcaaacgctcttagcctactttattttggtacacaccttagaaacaaacagaactaacaaacacctgtgaaggcaaagatcagctctgttctgctctacacggcctctgcagcagctagcagtacttagctctcagtagcacacactccaacagcaacttgtttagctgttccttacacacacacacacacacacacactcagactctgaagcttcccaggcctctccatctaactaccaccatccttacctcttgctgcaaaaactaactggtcttcccacttcaatactttctcaactcagaaggccaagtgttctttttaaaccttaaatcagaacatgtcactctcctgcttcagattccccaaggatttcctacgcactgcaaataaagtctaaattacttacgatgacccaaggccctacttgatttggcctgcttactttccagattgctcactaggacccagcaacatgagtttcccttcagtttcttcaggagcccttctctgccaggtccttcctagctgggcctttgtccttcttcactgtctgccaggaacgctgttcctggctcattcacgtggctagctcctcctcaaacttaaggtctcagttcaaatgtcatctcagaagagtctttccaaccaccctgcatataaggtaagctcccactagttactctcattggcatcacccttttggttcctttataggtttatcataatctgaaatggattacgtacttcattttatttgagtatattctgtcttctctcactagaataaaaactacctgtttgattctctataatatttgttgaataaaataaacaaactcccattcatgggtctgatgttttttaaaataaacaagaaatatacaagacttatttgtacaggacttatttgaagcaaagtttgaaaatctactgagagacataaaaatctatgagaacacaggacagaaagtgcataacgctgtcaatttccccaaacttcacctacaatttcagtattcacaatcaatattcagtattcaataaaaatctctatgatttctttttgaatgtcacagaatgattctaaagttcatctagaagaacacatagaccagaattgtcaaagtctgaaaaaaagagtaatgaagaggtaactaaccccatctgcattaaaattataaaatgatagtaatttaaagtgtatggtaatacacaagagacaaaaataacaagaccaatcagaaatagtcccaaacacatttagtaaatgacaaaagctgcaattttaatagtggggcaaaaaatggattgttcgctaaatggtgctgacacaactagctagttggggtagaattcacacacaattttatcccccaaaatatgtctcacttcttataccagaaaaaaattccagatggatcaaacaattagaagttttaaaaagagaaggaaaaggaaaaaaagaaaccattgaagtattaaatacaatctggggacttctttgttttaaaaatacaaaaaggcatgcagttaaaagtcttcctctcactcattcttcttactatgacaaccaatgtttccaagtatcatatatcctgtgatatacaagcaaaaatgtatacattgtttttcatctttaaagcaaagacacatagaggcatataatgttcctcactttgtttttctagtttagtagataggtgaatattttacattttggagcacggaaagtcttaagtagagcacaaaacacaaaagtcacataaataaattaataacagtcacagctaacatttattatttacttactttgtgccagccactatgcctaatgctatttacatcatctccattttacaaataaggaaattaaggtgtacagaggttaaataatgtgcccaagttcccatagcagcacagtgctgggtttggattacaaaagaatagctagggggatatgagcacacgtacgaaaaaggtgagtaaggccaggcacattggctcacgcctgtaatcccaacactttgggaggcccaggcaggtggatcacctgaagtcaggagtttcagaccagcctgaccaacatggagaaaccccatgtctcgtaaaaatacaaaattagccaggcatggtagtgcaggcctgtaatctcagctactcaggaggctgaggcaggagaatcacttgaacccaggaggcggaggttgaggtgagctgaaatcacaccatcgcactccaacctgggcaacaagagcacaactctttctcaaaaaaaaaaaaaaaaaaaaaaaaaagaaaagaaaaagaaagaaataaaaaagtgaatatgtagagaacttttaacctgttaaaaaccagtaaccccaacagaaaatgaacaaagaacaaaagtaggcaatttataaaagacatatggccaggcgcagtgacgcacacctgtaatcccagcacttcgggaggctgaggtgggcagatcacctgaggtcaggggtacaagactagcctgactaacatggtgaaatcctgtctctactaaatacataaattagctgggcatggtggcagatgcctgtaatcctggctacttgggaggccgaggcaggagaatctcttgaacatgggaagcagaggttgcagtgagctgagatcgtgccactgcactccagcctgggcaacaagagcgagtctctgtctaaaaagaaaaaaaaaaaggccaggtgcggtggctcacgtctgtaatcccagcactttgggaggccaaggcgggtggatcacctgaggtcgagagttcaagaccagcctggccaacatggagaaaccccatctctactaaaaatacaaaattagccgggagtggtggtgcatgcctataatcccagctactagggaggatgaggcatgagaattgcttgaacccagggtgcagaggttgcagtgagctgagatcaagccattgcactctatgcactctagcccgggcaacaagagcaacactccgtctcaaaaaaaaaaaaaaaaaaaagaaagaaagaaaagaaagaattacaactctcttcataataaaaaatgttcagcctcaatggtgattgacaaaaggccatcagaatcacattttttcagttcctaaattgtcaaaatgttttaaactgtaatatctagtattggccagggcatggggcatacctgaatactattggtagctttacaaattggtacaacaaccttttggaaggaaaatgtataaatatctatccatatctacattattcacatcttttgatttcagcaactccacttctaggaatctatcctacaaagctgtttgtacaagtacacaaaatacatatacatacgtacatgtgcataaatattcatacacacacacacaattgtttactgctttctttttctggcaacaacaaaaaaaaaatccagtgaccgtatgttgattaagcaaattatggtattttctttttttctgtttgaaacagagtctcactctgtcgcccaggctggagtccagtggcatggctcactgcaacctccacctcccagtttcaagtgattctcctgtctcagcctcccaagtagctgggattacaggcacatgccaccatgcctggctaatttttgaatttttagtagagacagggtttcaccatgttggccaggctggtcttgacctcctgacctctggtgatccagccacctcagcctcccaaaatactgggaaaacaggagtgagtcaccgtgcctggcaaattatggtattttcatgtactagaaatggggtattaagttgctgttaatgattgataactctgaaataaatagacaaacttggaacagtagtatataaaagaatagtatattatgatcccataatatagaaaattatacaaacacagaaaaaaaaaatggaagaatatgcaacagtctcagtagattacatccaggaagtggttctttcaatttcattatatataaaaaataatgtattacttataattagtgaaagataagattttaaaatagcatatcctccttcatgcattaaaatgattttgtgtggatataaagtaacgtctttctcccccctcaacagaatgtatatactcccacatcaggtatatttacgttctgcatattttaggttataactcctagatagcacaagttttgatttcattccaaatacctccaaatacataaaagttattgtaattaaaaatgaatttaaaaatcttaaaagtaatgcaaagttaaacatctttgaacagaaactcaaagtcatgatgatgactacttaaacattttcaaaattacataaatctctatgttattgccaagggaaatgaattgcctaaaacaaattactctgaatgtgaacagtatacgacagtgataatggcaagaagaatatctgtcagttcaaccaagtatggggtaaaggggcaatctataagcataaaggtgactctcatcataaatctgagtcaaattttcctagaaaaatgtaaccttctccaggcgcggtggctcactcctgtaatcccagcactttgggaggctgaggcaaaccgatcacgaggtcaggagatcgagaccatcctggctaacatggtgaaaccctgtctctactaaaaatagaaaaaattagccgggcgttgtggcgggcacctgtagtcccagctactctggaggctgaggcagaagaatggcgtgaacctgggaggtggagcttgccgtgaaccgagaccatgtaactgcactccagcctgggtgagagcgagactccgtctcaaaaaaaaaaaaaaaaaaaagaaagaaagaaaggaaagaaaaatgtaacctcaatatatttggttttgatatcagtttacttgtgtataacaaagaataaaaacagccaaacagcccaaattttgttccttgagtatgctgtaatgggggaaagaaatccaaataagttgggaatcttgacgtttcctttactcctgactaatctacttaagaatttaattttttatataaaactagtcgatattattctttcaaagggagtcctaaattctattataatcaaccaactgttccatgtttcttttcttttatttatttatttttttttgagatggagtctcgctctgtcaccaggctggagtgcagtggcacaatctcggttcactgcaacctctgcctcctgggtttaagcgattctcctgcctcagactcccgagtagctgggactataggtgcgtgccaccatgcacagctagtttttttttttttttttttttttgtatttttagtagagacagggtttcaccatgttggccagaatggtctcgatctcttgacctcgtgatccgcctgcctcagcctcccaaattgctgggattacaggcatgagccacggtgccggccaatcttcccatatttctaatatccagttttttcctaggattgaaactactccaaaatttcctgaatacataaattaaaacattattgcattctaatattatctagaaccatgagtgctgtctaggatgaaccaatcccatatttactttctcttcctcccccaaatcccaataaacagaactttttttttcttttttaaagaaatgcttttaactgggctcagtggcctgcacctataatcccagcacttcaggaggccaaggtgggaggatcacttgagcccagcaatttgaggtcagcctgggcaacataatgagaccctgtttctacaaaataaaagaaattgaccaggtgtggtggcacacacctgtagtcccagctactcgggaggaccacgtgagcccaggacttggaggctgtattgaacaatgatcacaccactacactccagcctgggcaacagagagagaccctctctgtaaaaaagaaaaaaaaagaaatattttgataatttactaaatacagctatgttagtcactgacattggtgaaatttctacctgttttttaatttccaaaaactattcagcatcaaactaccatatgtgtatcagacatcttctacagcatccacactaactctagctgctaagctcttttatgcattcaacaagtatctactactcctgggcacagggtgttattctgggagtgggaaaagaggaaaaaaaattaaaaactcagatacagacatgcctacaaagggcttatggtctagaggcaaaggatcaagagtttccagaaaaaaaaaaaacattttggagaagagggaataggagagacacttcctggatgatgtaatatgtgatcaaacccttgaaaaataggataaatttagatgtagtagagtttggaagagtaagggaggaaaggagtattccagaagcaagcatcgtaacaagaaaaaacaaacaaaaaattcttcttaatgcaacacaaaatagcccaagtagaataaagaaatatgccatgcttcaatatttatgtaaagcttatcagcttaataaaaatatgccttttcctttacaataaattttataggctgggcatggtggctcatgcctgtaatcccagcactttgggaggccatggtaggaggattacttcagcccagaattcaagaccaggctgggcaaaacaatcagatcccatctgtatttttaaaaaattaaaataaaataaaataaatgttatagcatgaatacttacagaaaatgaatactacaaatgagctttttaatgtaaaaaaaattcataaagaatacagtcggccaagtgcagtggctcatgccgtaatcccaacactatgggaagccaaggtgcagataacttgaggccaggagttcgagatcagcctggccaacatgacgaaattccgtctctactaaaaatacaaaaaattatccaggcatggtggcatatgcctgtaatcccagctacttgggaggctaagcacgagaatcgcttgaacctgacaagtggaggttgcagtgagctgagattgtgccactgcactccagcctgggcaacagagcaagactctgtcaaaaaaaaaaattcatgattgtgctatttatctaagcttttatattaataaaacaattgaaatccttcatacttaaaaaaaaatccagaagcctgagagtaggcaaaacaaacaatagataatttacaaaataatttaacctatttgtaggctgggtgcggtggctcacgcctgtaatcccagcactttgggaggccgaggtgggcggatcacctgaggtcgggagttcgagaccagcctgaccaatacagagaaaccctgtctctactaaaaaatgattttaacactgtctttatttcccaaagattactgaagtcatgtgaaataaaaggcattagagattctatttttctgacaaaatatttaagagccttccttttcttctaagccaagtaattagggctcctttatatatccatcacatacagaacacttctagacaggaaaagatctagcagttgtaagtttttctttctcattttatgaatcctaacacaacttccacagaccatctatgacatgaactttctgacttttcctgtatttccctctttcataatcagtcattctactttagaacaaaaatttgccatacaagatcctctcatataacatttctttccttcataacttttcttaccataaatgcatcttcatatccacaactttctttagatctctctccctgactgatttctgatgcccaccaaaacctaaaaggtcagataacgcaaagcaaaacagaggagagccttagattttgagagagacctgtctgcctgatgttcttggggttccatgaggacaacagaggtttctcctaaaatggggttagtagcaccttctgtttttctttaaggagtcccagcctgtcagaaattaccttacgtcctgtcatgtgggcactgattggcaacaagacagactagggaacagctggcaacaagacagacaactgagcagaaaaagaaaaacttactacagtccccactgtaaagatggataaagtgaggcaccatgcagtttaaaaattcatgttacatagagttgggctccacagctcactctcttaaccatactgtaattttgctgaatctatgcccagtgactgatgcacctgtatggtaccttatggcccccttagtgcttagaacctgggtttcattcctgctctacagctatataatttaacaattttcctctgaatttgttggattctaaccctatatttctaaaattttattaatattactgaatcttaaagggagctgtgatgtctttagtctttagaaatattaagcctataaacaaaggactatatgaagttaaactgtattcaaatttctacatgatttaaaacattgaggcggccgggcgcggtggctcacgcctgtaatcccagcactttgggaggccgaggcgggcggatcacgaggtcaggagatcgagaccatcctggctaacaaggtgaaaccccgtctctactaaaaatacaaaaaattagccgggcgtggtagcgggcgcctgtagtcccagctactcgggaggctgaggcaggagaatggcgtgaacccgggaggcggagcttgcagtgagccgagatcgcgccactgcactccagcctgggcgacagagcgagactccgtctcaaaaaaaaaaaaaaaaaaaaaaaacgaaaaaaaacattgaggcaaagtattaagaaacacacctaagaaactgcaaccaatctactctggacaaaaatttagatactatctcttcaaaataagctacctagtggtatttatacatattcttccatatatcaacagtatcttacatgctcatagtcttaaaaataactaaaaagtgtcagaattataggccttacacgtttctgttggcttgaaaaatgatacgaaatgcataaacttctggagtgaccagtttaaaaaaagagttcataccaaaggtagtaatactaagaatcaaagagggctaaacactgcaggttcttaaaggagaaagttaataaaaccttgtttttggttgtgaatctttgccttaacaacattatacacatgattccctcccattctttttcctcttgcaaagatgtggtgatgatccaggtttgctcatgcacatgacaatactcttgaaaataggggcagagaaaaatatgaagggaatatgggtcacttaatcatctcataaattacaacttattacccctgtgactcttgcatagctccagaaaaaatatgtgagagagatgaaatggctgtttgctaccaatattttatgtgatgcttcattttttgattccttgaataacacttacaacgcattagcctatttatgccagaggttgcaattttttgaatttttgcataagtgaaaaatcagaccttgtcgatgacatttagcagtaggatataagtaattcccacatgcttagcgtggaacactaggcataagtgtgttaacacaattatgaaagcatagctttcaagtaactaattatacaactgacttttttcctcatctctaaaacatagtaagggatcagttatttaaaaaatacaacagtgacaactattttatttttaactcagttttggtttgttaaggcccttgcttggcataaaaaaaaaacaggaggagaaacaataatacaaacatgaaatagaagcaatagcaaaagaaaatgaagaggaacaagaaaatgagaagaaaatacacaatggaagaaaggaaaaggaacaggcgtgggaattagaaggctcagtatgatactttttatcccctcctcgattcataaaatttgagtaactgcaagagtattacaagagaaaacaagcaaaagtatacacaaatagtcaccccctatattttgttaagaatgagagaatgctgccactcacgcctagctcaggcaccagcaggagggcacactctagagatttcaggagaagagggaggactcctctttgccctaggtgtaccaccaccactgccaccgagacctttgttacagcatccacaggttcctccccaccccagaacgggatgggccctgcagtgttcctactcccccgtcccggcccccagacttcctactgctaccaccactagcgccaatgccaatacaaccagtcaccctcaacgtaccagcccaccctaccaggctcctaccacctggcccccgtgggtgccctcataccactccagtcgagctgcggtctccatctccaccaccaactgcatgaggcaagctgcagagccacgtcatctgctcgaccctaccacaggcgactcctccttctcctccttcagcctggcttggagcagctgggcaggcaaagccagaagatcccaaaacaggactcagggagtggaaccgttagagcctcaccttctcatgctgatgactgggtgtcagggatcagtttcattgaaggcactcacacccaccttccaaagtccaacctcttcttctggcaaaagctggccaggaactggggcctggggtgggagtgagtgccttcactgaaaccggcccctggccaagtccagctggccaacaattgctgggcccaccaaggctgccctcctcgcagagcctgagtaggagaaactcagacccagccagccctccccacccaagggctggttcccatacctgacacctccacccacagtgccctgtaccccacttcccccatcatgcccactactccctgcctggtagtcccaggtggtcttcgcaacacagagcatgagcacggggcaggaaaccacagtgggtgtggaggccctgccgtgcaatctagctcgcatgggagaaaatcgccttctagagtctggagtccaagaagaggagaaccatcccttacttggaggctaccagaagaaggaggtcactgctgtcactgccgctgccacctcctcagctcgccaacgccgctggcagtgtagcccccatggcacccctaatctgctccctgccactagcagtgtagcccatggatagcacatccaacacaccctacagtttcagacaatgtaaccccaatacccccccaaagcactccccccacacctcagggagcataccacccaatagtgcccacaatctgacccagccacgggcagttcatctcctgatggtgcaccccccagtcacaggcagtgcagcacccaacaacgcccctaaaccacccccaactgccagcattgtagccccagataactccacccaacccaccccctgccgcaggcagtgcagcagaagatagcacccctaatccttcaccagccgccggcaatacacgctagtgtacacaatctgcctccccccaccacccctgccaccacgggcagtatagccccagatagccagccaacctgccccacagccagcaatgcaacaccagagagtgcccccaaccagaccactgccacaggcagggtagcctctagcagtgagccccaataggacacccaacccttgcccccagaggcgtacagggcaggcacggaaactcacctaccccatcacatttctaccactgtggctgagctgcagtctccgacatcactgacaatcacagcgaggcgagccatgatggcacaggttccagcctccagcatgtggcagtgcctcttccttctagttctccagcccagcagaagctcctgctgcccgccgccctcctactgctctatcgccaccaccaaccgtagcgaggtagtgacccaggctccaggctccaggctccatccatcctccagcctccatccatcttccaacctccagcaggtggaaggttgcggcctcttccagtcctctaagctgggcacagagtagctcctccgctcgacacagaagagcctgaaatgacctgacatgacctcagcataagaggttatgcaaatgcagttcctggattacatgttctgattggacaagaaaaaaaaacctctaggcctactctgattggactttattttcatgctgtgattggttgtgttaagacttgctcttatccaatcagaacatgatcataaagcccaatcagagtaagcctggaggtttttttctcatccaatcaaaacatgcagtgcaggaacctccataggcataaccgcagtatataaatgatgctgaagcgtgatcacgttttttcaggttcctgtatcttcctgtcgagttgctggctgcccgatgtagaggactaggaatcaggagtcagtggccgtatgctggaggctggagccgagggagcgtggctcccctcgctgtggttgttggcagcaacggagagatagcagcgcggctggaacggtaggagaaggaaaacagttttgggatagatggaggggattaaagacggtaattagtgccaaagcaaaaaaaggatagcttagccagagaaggcaatgcaaaaagatggcggcaaaaagatggtggggaaaaaagtttttggctagatagaggtgtaaaaacagggtgggaagcgggagggaaggaatattttgcagaaagacagtgggtaaaaagtttaagggtagatggagggggtaaagagggtgtcaagtgggaggaggaaaatgagggaggtgatgggggaaaacagggcaagcagtagggagagaaggttttgtgaaaagacagtggggcgaaaatacagtgggtgggggaagttttcgggttgaggagcaaaagagggtagcaagtgggagaagggaaaagagggtagccagcaggaggaagacaaggttttgtgaaaagacagtggcagaaaagaaagacggtagagaaagaaaagacgatgggtaaaaagtgtttggatagatggaggggggaaatagggtgagaggaggaagaaagagggtggcaagagggagcagggatgggggttgggaaaacgacggaaaaacagtttggggtaggtggagtgcaaaaaaagagggtggcaagcaggataggggaaagaagagcacgagcggtaaaggggggagactttgaaaagggggaagttttggggtgtagatggagggggaaagagggaggtgaataggagtggggagaaggctttgtgaaaagacgggggaaatgtttttgggtagatggagaagggaaagagaatggcaaggaggaacgggggaaagactatgaagaaaacagtttttgggtggatgaagggggaaaagagtgtagtgagcagcaggagtggagagaaggttttgggaaaagatgggggaaaatgtttttgcttagataaaggagcaaaagaaggtgatgagagcgggagggggaaaagagggaggccagggataaggggaaaagacggtgggaagaaactggggaaagggtttgggtagatggatggggaaaagggtgttgagcaggagagtagagaaggctttgagaaatcagggtgggcaaaaaatgatgaagtttggggggcagatggtggaagaaaaagggtggtgagagggagggggccaaaggcggtcgggaaaagaaggtagggaaataatggtgggggacaaaggtttcgggtagatttttttaaataagatcatttgtatttttgcttttgagcagtttgagttctttatatattttgtgtatgaaccccttgcctgatgcatagtttgcaaatacttgtttccattctctgggttgtttcttcattttttaaaaattttaatttaatttaattttttttagacggagtctctctctgtcacccaggttggagtacagtggcacgatctctgctcactgcaagctctgcctcctgggttcacgccattttcctgccttggcctcctgagtagctgagactacaggcgcctgccaccacgcctggacatttgtctttttaatagagatggggtttcactgtgttagccaggatgctctcgaactcctggcctcgtgattggcgcgcctcagcttcccaaagtgctgggtgtacaggcgtgagccaccactcctggcctgtttcttcattctactgactgcttcctctgttttgcagaagctttttttttttttttttttttttttttttttttttgagatggagtctcgctctgttgcccaggctggaatgcagtggcatggtctcagcttactgcaagctccgactcccgggttcacgccattctccagcctcagcctcccgagtagctgggactgcaggcacaggttaccaagcccagcaaattttttgtaattttaatagagtcagggtttcaccgtgttagccaggatggtctcaatctcctgatctcgtgatccgcccgcctcggcctcccaaagtgctgggattacaggtgtggccactgctcccggcctggaaacaactttattttctagtgttgtatttgtatatatacttaaatagcctttagttttaataaagttgcttttaaaatatgtatcttatttttcagaaatataccctaaggcatgtgattagttgggtggcatgttctttagtttttacaattgaaggattgtcattcctttatacaaaaaaaaaaaaaaaattaaaggtgaatttttattatatactagaggaaagaaggcagatactaaataataaatactgtatgcttccatgtaaataaaatttgaaattcccaagacaatgcattaaacccttctgtggttgaagttgggaatttcattggcaaaggtcatgcaataaatgtgtaggtgaagggaatattctatattcgattgtgtaggtgattatctagctttataaatttgtaaaactgaactggactaaaatgtgtgccttatacgcaaattattctataaaattgattaaaactagttaggagagaatcagtcaaggggaaaagaaagaaaaaacacgtgaaaaaataatgccaatgcactagaattgtctttgatgacatgaaatatagcctggccttctcttaattctttttaaaatttatgtagatttctcaatcctttgatacttttttctcaacacaccttatattctcgtatatgttgatgtatggttacataagagaggactcttttacagttggactggaacagcttgatatttatatctagagatgcattggaagcataacactgaccatgagcaagatgtaaatggcatatgctagttagtgattcataatctgttgctttaagtttcgtgccaactggtctacgtcgttgagaatgtttagtttgatggtttacacaacgtggcttaagaagtatatgaccaacaatgtatgagggagcctgctataaagacttttctacacttcccttaaattattatagtaagctcaaatcttgaaggttcataatatacagataaaatgtgtccgtgagactgagaaaggatcctgaaagacagactttcaatgatttcctgcattttatttctgttgtactttatctttacctttattaaacactaataaggttcttcttatagggcctcacaggcctttttagttttccaacctattcatacttggtgcaaacctagtaattttttgcatgatagtattgggattttactctgaggctaggtttcaaaactgtaagaacagctttctggaattgtatcattttcagtctttccatgtgttccattgtcccagccacacacacaccagataacaaaacgaaaagcaacctcaaaaggtaacacacctatagtagatgtttttacctcttgtaaaatctaaggaaaatatactaaaaatgaaggcatcagtaaaatagtatcactttaggttgacctcgagtatttcaacatcagtctagcttcagaacaatacatttgcaaggggaaatggggtacttttgtggttctttacacgtgttatttcaattgaaatagaaaaaaagaactaagttgaactaactataaccataaaaagaaggttttatcagtattgaaataaaataacagaaaatgcatttgtgggtctgacctcaggacggattttaaatagtcaatgctacctctctcattccctcttctctgagcatcagctttattcttattccatcttacttaatttggcatgacagatacagactcattcttacaacagacaccatcagaagtgaaacctttgctccaactcttgaaaaatctgagatgcattttgactattctcagatcatggatctattacttggatcaaaaagtactgcacagggaagtagatactataatctctgacattacagtttcaaggttggagtgacaaagggatagctcccataacgagggagtatcatagaaatgatattttcatggtcatacttttgtgaactaggcagacatcccttcatgtcaactacatctctactttgaacagataaatatccatgcatatacaaaattatacagtaatataagcatgcttttcattaaaattttaacccaaacagtctatttaggagaataaataccgatacaggagataattctgcttgaatgatctttacccttggggagacataaataaaataatgtcatactttattatgaaatgactatgcagcatatttatgaataaactttcataataaatttctttattgtctaaaataagcacaaaagcccttttagttaattaatatccctttttaatatacagaataaatataagaaaagagcacaaatggtattatgccagcacacagaaacaatttcagttaaaagtcaatcctgtattttgagaacctgacaaaatcataattgaaaatagtgtattatcttacatgcagatgttgtgtaatcagggacatccaaatcaacttacatccaaatatttcacaattaatctttgacatattctgtgaagtattgtaaaaccatgccctcaggaatataaaagcacaaagggaggcaggactccatatagccatttattcatttcctaaggttagatacaatgaggactgcatcttcaacattatcagggccatacagatattggagcttaaggataatatccaatttcatagcaatctgttaaagtataagccagtcttatgacccaaatgtgcaccataataatttccatcttgagtgatgatgctacaaatacaaaggaatactgcatctctaaaataaactacgtttatatgacatgagaacaatttgatgaaaagaaggcaaactatgaatagtaactttgtttttttaattgttttcattgtgtgtattcatatctgaaaatataataccatgtaattagaaaagttataataaaataagactggaagtcttaactttttatatcaaatgttctgcacacaattatagccttttactgatgatctatggctccaaaatattggtagctataattatgctttgtaaaacagaagctatgaatgccttactacagaaagacacaaagaatcatttccttactcactcactgctagtagaccctgaggcacagcatttcctgcccagatacctgattattaatcccgtttttgttaggggtatactaacattaactaacggagatcggtgcttaaaccagttaacgtaaagaaatgctgtaggaactgaaatattccttttaaattaacaaaagtgttcttctagacagacaaagttacatgaggacccaaatgtataccagaaaatcatttgatgaacatggaattaataaaagaatgttttgttatatggttttagtacttcgttggtgccaggttacagacatgtggccctagatagggtaactctacagaagagaatttaatttgtttacctgcttcactagaaatccaacaattaagtcagtgactctattttccaatattcatttcctccattttttcatctctttttgattgatggtatcatttcattatttcattttcattgacatggaattcattttggctaaaatgactttttgactatttgtatatacatatatgattttaaaatcaatgaacaatattgtttctctatttccaagattatccctctatattctctaaagtcgatactgtgaaacagtccagatatgagtctaggaatggcagtatgaaatactgtaaaactggaagcaacttagtaggtaatcaatagggaaaaatgaaactcaatataattgactctagttaatgtaatgatgcatttattttacatttttcttgcattcctgagataagtcctgcctggttatagtatattatgtattttatgtattgctggattttgatcattagcattttgctgaagattttttccatctacttttgttaaagatattgttctgtgtttttgtttttgtttttgtttttgttttgatgctattgtctggttttgttattagggtaatactagcttcatagaataaactgggaagtgtattctcttttttttcttttgcaagagtttgtaaataattgtattaattcaactttgaatgtttggtagaggcattcttggctagaagattttgttgctgttgtcattgtttcctgaggtggtagttttgattactaacttaatctctttacttgataagattttatatatctccttgactcatttttgctaatttgaacctttcttagaatttgtccagttcttaaaaagtatctaaattttagatgtaatttttcataggtacttttataataattttttatttctttaagtttagtgtccttttaaaaatttcattaatacttgaatagcttctctttcttgttggtcggtctatctaaattgtggccactgttgatgtgttcaaagaaacaatttttggctttgttgaggttctcaattgtttttctattttgtatttcactaatttgtatatctctaatactttcttgtggttgctgtagttttaatttgctcttcttttttcagtgccttatggtggcaggttagagaatgttatttttgagtatgagaactacttttattgcatcacagagatactatgcattcttaaagtattttaacttttttaaagtattttctaatttatcttattatttcttcttgaacccattggttatttaatagcatgttgtttaatttccacataattctgagtttcccaaattttcctattgctgatttattattttactcaattattgtctgaaaatatacttcgtattattccaatgtttaaattcattgaggtctattttatggcctggggtatggtattcctgggtaatgttgcatgtgcacttgagaatctactgttgttacggtgttccttaaatatttaatcagtctagttattttatagtattgttcaagtgttctatttctttgttgatcttctgcctagtcatttgatccacttgtgaaagtgagtattaaaggctgcaagaagtatgttaaattgtctaattaatcttcatttttggaggtttctacgtcaatggattttgaagtcttttcattacacatatatatgcttataattgctatttatttttgagatattggatctttatttctatgaaatatctctctttacctctgtagttacccttttgttttaaagtctacttttttctgatattaatgtaacaattccagctttcttgtggttactgcctgcatcatataacttttccatccttttttttctatgaattttcatttttggatctgaagtgtgtcttctgcagacaatatgtagatggatcttgtttatttaatttgtttttcctccagtctgacaatctgtcttttatttgaatatttaaattcatttttacttgaggttactagtatagttagatttacatccatcattttacttcagttttctgtataccttatgtcttttcattcctctattcctcctttactgctttcttttgaattagatattttttataaaacatttaatttaaatttaataatattttatctatatattttcaatgtttccctgaattgctactttagggtttactgtagacatcttatcacaatcaattttagatacacaacaattctagtgacataagtatatataaatgttacttttgttcacttttgtatactttggctgtcctttttgtgctattatggctgtacacattacacctgtatatgatatatacccaataatttagtgttataactgttacttgatgatatggtttgttgctttgtcctctccaaagttcatgttgaaacttaatttcaatgtgacagcattaagagctggaaccttgaggatatgattaggctattagggctctgtcctcatggatggtatgagtgtgttatagaagggctggagggaattaggaccctttgcctttgcatccttttcactgtatgaaaatacagcattcaccccctctggaggatgcagtattcaaggcacctcagcagacaccaaacctgccagcaaattgatcttaaaattccagcctgcagaactatgataaataaatttctttacaaatttctcagtctctggtatatatatgtatgagcatgaacagactaacacacttgacataattttatgtcttaaaaagataaaaagaaacgtactatgtatttacggcttttgttatattaacagtcttatttattatttcaggtcttttcatttgttcagcatttgaaacttcttcctgacagcagaagggctcttcttagctgtctttttcctgggttattcctggtaaactagctgacttttgtttcaaagcatatgtctctaataaagtgccagtctctcttatttgctttttaccatcacttcattgtttttcgaagtacccttacggttgaatttccccaaacttttcttttgggaaaagctttagtttctctgctgtatgttgtgccccttcctttgggcaaaacttctgagctttggctctggtgattgcagcaaagagagcagcattctcctctcagagtgacggccctactttgagacagggtcactgggatgagaagtagccgttggtaatctcagcttgccactcctggaatcagaactttgccttacagccaaaccagaaagaaggcaatcagggctcagtgttctcagtgcgttgcacccaaacaatcctcattccatgagttagagctggtaggaagaagtgacattctacttcttggccacattcaacaaaagcttaacctcaagaacaggtagtggcagcaggtgggggttcaaatgaaaaattctgatgtactgttactcccagaaaattctgatgtactgttactcccagaaagatactatagccccccaatggggtctagtaaaagtcctgtgttcttggctacattgccttgagtagagtttatatcaagataggctgtgagaaagagaggtaagaatgggttgtggatgaaatgcaaaaaaactctcactgttcttagtgagtttcagtagattttcttgaataaatacttcatcattttctgtgtaccattatgacttttcaagtgacataggtgatggttgttttataattttcaacaattttataaaagatccatggagctcttcacattgccattctagaggtggaacttctgcatttatttcttatgcaaggaaattaaggttttctttaagttactttctcttctttcttctaaaatatgctttggaatctcactcttacagcaaattgggtgtcagtgtatttctttctccaagagaagtctgctagatactcaaataatttttgtttgagattgttatgtttgaaaggttgttttgttgttaaacaaaagacaataggaagatcaacatgaaaccctcacattcattgtatgtataatatcttttcattcagaatgagttacagtatatttgagtgctcataaagctttaaaaagaagtggattaagtaatcaatctccctagacagataaaaaagcacatgatattttggtatttcccaactttcattatttgactttcatgttctagcaaataactttcaacaatttgtcaacgtatttgcagtcatttatattttacattattaattccattatttatgcatgtgttgaatagactttatagagtagatgttgacacactcgattttgtaacaaagtgaaaaattactttgatacgtatttctttttttctgacaaaattctgaagtgcttttccatctcttccaaaacaacatatagaaaacgtgtttttttctcattattaaatatatgactcggaatacagcaaaactaattggctataaagcaaacctttaaaagagaagagtttgatgaaaaatataagcattcttagttatacataagatcccacagagccaacttttttccagatttatgtcccaattttaaactttaattcctactgtctaagcattgtggctaaaagtatgagataattaattactcctgacatccaacttttgtgatcatagtaggtgacattcctttgaaaaaaataacttaaaaattttctggtaaatgttacgtttgtgtgtgggtgcagagtttaattttcataccaagctcacatatcaaagttaagtgttttaattatcttttaagactatgtccttggatgctatgctatatgccaatatttatatatgttgaatatacttaactttcatttaacttacatagccataatgcttaactttaatcagagattccttactaattctgatgaatgttggtagaaaatatgctgaaaataaaatatgttagaataatttttaataaaaggataaaaggaaagaaactagcagaagagccggcaccacagaaagcaaagtcacattctggatccaagcaaagttttcatgagcaaagaaccaacaaattgaattcacgagacagggagcagaagcaagagagagaagaggaagtagacttctttttgtttttgttttttatttgttttctcatgagaagagtgtactagtagtagaagtaagttctatgaatgagatcagaaagacataggtagaatatctggaccctctgtataggataggtagttattatattgtgtgttctggaggtaagatttatataaattcaagcctacaatagtatcaaggcctattaagcaaacatccattagacagcaagaaagactaagaggctttcaaactacaagtgttaatagttaaatgtgaagcaaatatatagacatttgatactatgacaaaaataatatgaggtttatcataatttaatattttcttgtttagtaattatatatagctacacactagtttttcaaaacttaactaatcctctttaaatatatttctatgaaatttcctgctatacttgggatacagttgagtgtaacctcattctgtaggattttttttaaaaaatcatgaaacaacatagtgataaatttaaatagttttgccagttgaatcatgtatgtgataaaaaggctttatatttctgattcctaaatcagggcatggcagtacaaatcataaatcaagtattcttatgtccgttgaataattatagaagaataatgcccaaaccttttttgaatgagggtatgtcatgagcatcaaaagggaaaaaaagtatgaaaatccctaagagttttactccagagagtcatatagattgtgcgttctttagctaacattttaaaacaaatatctgaaatcacttgcttaacccctttgaataatatactattgtccttaagagaaattcagtaatttactaaaggttcttttcacatagccctgacttctctctccagtcacgtgcccttactggtgtctatgacccaaacacactagttgtctctcgatttcactaagatgttctgcattctttcttctcacagcttttatgtctattgctgcttcttcaaggcatacttctctaatatttactagctactgtctattattttgaatcagtttaatggtttatttttgaggagacaagggcaaattttgctgctctatattcccatagtattgtagtcttctctttattaaaaactcatcgggctaaaaattgtttgtgattcccatttatttacctgctagattctaaattccatgaagactggaaatgcaacccttttatttacctgtgtatctcaaactttgtattcttcctgtgagacagtcttgtatttataaaaatgaatgaaatttttgtgtttatatactgcattaccaatacatcttgcactatgaaattttccttaatttcaaaaaagccaaacattacttttttctcatttatatagtttgaaattcttctctggcaataatgtttcacctataaaaagacctttttcaaaaaagaaatacagaatttttcaaaaagaactaagataattgtccactaatctcccattaaatctcttagttctacttccacgaaagatattaccatctatgattaatttggatttcagaggaagaaaatgtagtttgaggaaaatggattgtggagcaatctcaatgctaactactataaaatagcttattacttgaaaaatgaggctattgtatgaattttcactagtcaattggtagcaaaaacaaaatttaagtgattgtaaacatgtcatattttaaactatcttgtaaagatgtaatgtacagagatatatatgttactagcatctggattcagaaaaatatctaactggaaccaggtttaagttgggtaattgtagtgtgtctaataattttaatacaaggtaaaaacattttctgttgaaaatcagttttaatattgagttaggttttatttatattttgaaaatttaaggactcttgaatatccttaagtaaattgcaatttaatgcaattgtagttatactcagcagtatagtgacacttgattaaagccattataaaggaaacataatcccatactgatgatcttcacatttctttgggttagagatcagtttatttcattaagattacagttcaggagaaaggttattgactacatgtatctatagtgttgtctaagcaacagttaggagtttagtttgcatgtttattatttttgagagcacatcaatgtaatgaaatgtatttaaaattgtacccatatatacataattatatatatttatatatatattttttacaacagtgtttttccttggagatggttcaatcaaattgcagaagagacacttctaattagttattaggaaggacaagctaggattgttttcctgaacttttgtgactagcaatgatgtcttacagacgtgggggtctggacacttggatcttcaattggaaatggttaaaacattgttatccaaagaatgacaatggtttgtttgccaagtctttttgttttgttttgttttgttcttttgagatggaatcttgctctgtcacccagacttgagtgcagtggtgtgatctcggctaaccgtaacctccgcctcccaggttcaagcaattatcccacctcagcttcctgagtagctgggattacaggcaaccgccatcatgcccagctaattttgtatttttagtagagatggtgtttcactatgttggtcaggctggtcttgaactcctgacctcaatgaatccatctgcctcagcctcccaaagtgctgggattacaggcatgtgccactgcgtccagctgccaagtctttttgtgttaatattgctgttgaatatatctggtgttttcattcaagaaaacacttaaaagccattttaggggccgggcgcggtggctcacgcctgtaatcccagcactttggaggccgaggcgggcggatcacgaggtcaggagatcaagaccatcctggctaacacggtgaaactgcgtctctactaaaaatataaaaaatttagcctggcatagtggcgggagcctgttgtcccagctactcgggaggctgagtcaggagaatggtgtgaaaccgggaggcagagcttgcagtccagcagggcgacagagccagactccatctcaaaaaaataaacaaaaacaaacaagccattttaggataaaagaacgtttctcagaactatcactgtacacatcttcctgtttcactgattcctcttctctcctttagttttaaccttttgtgatagctctttatgcatcttcttctggggtcattgaagatgtgttctgtcttactggtttctgttaccactaagtacgtcttatctctaaacaggtggtttgattttatgaccactcagacaactctaagtaagatgcaaacatgtgctactttttcctactctacacacataaacttcaaacaattccctcttctgtctgcatctttcaataaggatatagacttagaacgtttaaaatcgatggataaccactctttactgcaagagtggaatactatattggaccatgattatgggcaagatcacctaaacagaatggataactttacactgtgtgtaagtactcactaggcactctcctagtagtgtctctacttgatagagaaaagtattagaagaaaaatgagcaacttcattctcatgatttctaatatgtcatcataaatatgaggtccttcatttctgttaagtagaaaaccaatgatgatactgcttacagaaaaccatctgtccgtgttcatctatatcaacaaacttccaggcaatttgcatcggcacaagctgttatttgtctttgctaatgtttaacaatgtcaggtggttctacttcttcccaggcagcatattctataaaattctcaatgacagttgatactctggaaagatagtatttttattcttcacagggtagaatatgcattacaaattctgtaatcagtaaaatacgtgcaatgaaatggtttcaatttcatgtatgaataatttttatgatggttatctaataatctaaaatatttatatttcaattagtgttttactaataccttattacttccttttaatcaatcaaaaaggagatattacctgtccaaaggaagcttagctatgtattatgcattggagactacattaaggaattcactaggcaatgagttctaggtgttaaaaggggtattaatttaaaaaagaatattaaagatgcgaaattttaaaccctcaaagacatgtgaataaaagatttaaagaagaaaatactgtgttgactgaacaatatttattttttcccaaatgtctaagctttcaaatcagggactaatcatgaaaaaccacatgacttatttttaaattaaaaaccatattgaaatgtatttttctggttgaagagagttttattctaaaaagaaaaaatgtctctgaagcaaaaaaaaaagagaaaacatatgctcttatgtttgctcaagcagaatttacctctgcaactcatataattggtgctataattatgtacagatatattttgatacttcaaagaatctataaaattccctaaatgaaaattattttagattaaacatgatattaatgatcaagacagctttttttgtttataagcaagttagattatattgcttatgaaagtttttttgtatttttattccatggatcatgcaaaaaatcatactagacaatgaaaggatatcgtgttttctcctttttgccttattaccattttttttctgcgcttagttctgcctttgctatatagtgtggaaatataaagaattacaagaaatgctcagatgtctttttcaaacctccaggttgccaatatattcacttcatcactctcatctgattcccacacattcctctatgatcctacagagcagtatgtttgttgtaaaatctaacagaccacccaactatggtttgcaacatcaaaccgtcatgtttcttgtacacaatatattagaaaattgggtttttacgtatcagagtagaaatatatttcatacatatttgaggcatactgttatattcttaaggaaataatatttaattgaacccacatgatttttactatgatgtaattactcactgaccaccaagtctacagccagcctctaccagaatcaagatacacataggtaaattattttgaatatcttttgaaatctggggtgctcaatttgatccatgcatattaccttaattagtatacatctattggtcattgccatactttttaaaatgagatataaaattatacaattatctgtaagttctctacaacatcttttcctagcagcattttacagcagacagaggaggctgccagtaggtagacaaaacaaaaaatagaaacacttcttcctaagcatactttttttcacatgtcataacgtgaatctactatcattttttagttttacttttgtattctgaaaaaatgttaaaattggttattaccactgtctctctgttctttcctaataatgtctttttcctctattgtcagcattttaaaaaacattcttgatctctaacacctttctagaaaattctgctgacaaattaagtggcagcttagaacaagaggagatttaaagaattattgttgataatgaaaacaatgaaatacgtatttggcatgggcttgttgcacgttgacaatatatcattgcataaatgtttgaaatatttttcctttatgaaataattgtcatcaagatcgaagctattgaatatatttgctgtatagcattttgtataaaatagatttatattgctttgagctgaacagatattttcaatgaaattgtccttggccagcgatgttatgtccatctaataccttatctctttcctcttctctttccccaactcacatgcaactgaaagatgctagaagttaacagttctggtaaagtagtcttctaaaatcctttttcatttatgtctagagaaaaaaaggtaccaaaattcaggacagatttttcttcaaggtatcaagagtagaccatatatattttttcaataaatttataaagctatattttagaaatcaaaaaagaaatatttgcattaaaaccattattcccttaaatttttagaggattctgtttgactttggcgtgaataaagtccattctcttatttgcagtgctattagatatgaggagttttagcagagatcctggaacaactgctgcctatcagggtgtgaaatcaatgagatggattccagtagaaactatttactttgctatatctcctcaatatatgtatatacaaacaagatctttgacactggcttgaaatccacagcaagaggtacaccaggaagcatcaaaaactattaagtatatacaaaaatagttgaatgcatacctcagttagcaatgttaacagggtttgtgtcccacaaccattagattttgctacccacaattatcagaccaaattaaagtaatatgagcacaacatctccactcaaggacagtatcattgcaaatttctgctcatttcaaagcaatataaatatgttttatacaaaatggcacatagtaaatgtatttgatagcttaaatcttgatgccaattacttcataaaggagcaaatattgtcaaatatttatgtaatgatgtatcattagcatgcagtttgtgttcctttaacatagtaaatgctttcttctgagagaaaaggggcctcgattcttctatttactcattcttgctggaaaattttgcaaatataggaagaagaatgaatctagtaatttttttttttttttttttggcggagttttgctcttcttgcccagcctggagtgcaatggcacgatattggctcactgcaacctctgcctcctggattcaagcgattctcctgcctcagcctcccgagtagctgggattataggtacgcgccaccactcccgaccaattttgtatttttagtagagacggggtttctccgtgttggtcaggctagtctcaagctccggacctccggtgatccgccagcctcggcctcccaaaatgctgggattacaggtgggagccaccgcgcccggccaaacctaataattctttagaacctcttttgtgcaagccagacattgtcctaagcattttagagacacaatctcatgtatgtgtttgaaaaattatccctatgaaactaatgtttctaaactgtgaaagatacctcatttgctcctttaaattcatgtgccactttttcccattaccttttttaacatacattacgtcttctgggtcctttgacttataaatggcctcagctcatggtgaacccttaacaggagctgcgaaggatgaagagttagaccagcatgctaattcatcttgcttcttccctgtaagtagctacatctttaaccactgattcgaacaaagcacagactgtacaggatgttttactcctgattttgagtaatgcaccttctccttcagatgtccttgtggtaaggaaatggctgctaggaagtgacagattacttcgctatcctttctggtatctctaccccaaccctaatccatccacttgtaaattaacccttcaggaattatactagtctccgtgttctatgtgcactgcttatgaactgacatctgtataaactattgagaattcgagaagcttaactcaaacattgtttgaacatcttatggaaatagagggtgtgtctccacatttctccacatgaatattaagagtgttgatttttactatgttgatttttagcttctgtaaaggtaatttttatttttatacttatttttatttatcatatgactattaattgctcccaggtaatgtggactaaaagggctttcttagtttacacacactcatgcacacacatacacagatatgtatgcacacacgtgagacatttgcaattgtaaaacctactacggagtaaaaaggaaagggcataggcaaaatgccatggcttgcctacaactacaatttggatattagatatttatcttttgttctttcttcatagaactgctttgactgctcaggcttttaggggctccaaatgaattttagaatagtttttttttttctaattctgtggaaaatggtatgcatagtttcgtagggatagcattgcatgtgtagattgctttggacagtatggtcattttaacaatattgattcttccaattcatgagcatggaataattttgcatttgtgtcatctatgagttcctttaccagtgttttatagttttcttcttagagatcttttgcctccttggttagatgtatttctaggtattttaatttttgtaactattttaaatgagattatgttattgttttcaatcttagcttgaacgttattggggtacacaaatgtgactgatttttgtacattggatttgtatcctgaagctttcctgaaataatttatcagttccgggagcctttcgtaggagtctttaggtgtgggataatatcaggtgaagagagatagtttgacttctttttctatttggatgtcctttttttttttctcttgctgattcctctggctagcactttccaatctatgttgaataggagcagtgagagtggccatccatattttgttccagctcttaagggaatgcttccagtttttgcctgttcagtatgatgtcagtcatgggtttgtcatagatggctgttattagggagcatgttcctttaatatctagtgtcttgagaatttttatcatgaacagatgttggattttgttgaaatattttctgcatctcttgagatggtcatatgtttttttgttttaaattctgtttatgtggtaaatcacatttattaaatcccacatgttgaaccaaccttgcatcccaggaatgaagcctacttgatcttggtgaattaactgatgtgctattgaatttggtttcctagtaatttgttgaagatttttgcatctctattaatcagagatattggcctgtagttttcttcattgttgtgtctttgccaggcattggtattagagtgatgctggctttgtaaaatgacttgtgggggagtcctttcttcttaattttttgaaataatttcagtagaatttgtaacaactcttctacatacgtctggtagaatttggctgtgaatccagttggtccagagttgttttgattagtagttttttttttttttaatcactgattcaatttcagaactcaatattggtctgttcagtgtttcaatatctttcccattcaatcctggaagattgcatgttctcaggaatttatttcttctagattttctagtttgtgtgcatagaggtgcttataatagtttctgaggatcttgtatttctgtgtgattggttgtaatgtcacctctcatttctgtttgtgcataattagaccttccctctgttctgttcatctagctagtggtctaacaatcctgcttatattttcaaaaaataaacttttggttttgttaattttttgtatgggttttggggtctcaatttcattcaactccacaatgattttagttactacttctcttctgctagctttggagttagcttgttattctttttctagttcctctagatgtgatgttagatcattagtttgcaatcttcctaaatttttgaggtaggtgtttagctataaactttcctcttcacactgctttcatcatatcccagaaattttaatatgttttgtctctcttcacttatttcaaagaatgtttttcacttctgcctatattttgttgtttgcctgaaagttattcaggggcaagttgtttaatttccttgcaactttgtgattttaaggtatcttcttggcattgatttatattttttcctctgtgttctgagaatgtggttggtatgatttctattttttttttggtttattgagacttgctttatggctgagcatgtggtccatcttgaaatatgttctatatacagatgagaaaaatgtgtactttgtcgttgatgaatggaaaattctttagatgtctgttaggtccagctaccaaatgtcaagcttaagtccagaatttctttgttaattttctgccttgatgatttgtctaatactgttggtgagttgttgaagttccccacaattactgtgtgggctgtctagggctccttgtagatctagaagtatgtgttttatgaatatgggtgctccaatattgggtgcaaatataattaagacagcttagtcttcttgttgaattgaaccctttatcattatgtaatgcctttctttgctcttttttactgttattgtttgaagtctgttttttctgatgtaggattagtgactcctgcacttttatattttccatgtgtgtggtagatttttctccaaccctttacttagagcttatggatgccattacatgtgagatgggtctcttgaagacatcagatagatgggtcttggtttttatttttttaatgttgatcatattttagaaaggtattgagaaaagttgtctttctgataaatgtcatactttagtaagtaacaacttgagattcacatcacagaatttgccttagaggttgagcaataatagctttttgttgactaggcttgtagcttctctaaaatttcagaatctggccgggcgtgatgactcatgcctgtaatcccagcattttgggagggcgaggcaggtggatcacgaggtcaggagatcgagaccatgctggctaactcggtgaaaccctgtctctactaaaaacacacaaaaaaattagccgggcatggtggcgggcacctgcagtcccagctactcaggaggctggggcaggagaatggcgtgaacctgggaggcggagcttgcagtgagctgagactgcaccactgcactccagcctgggcgacagagcgagactccatctcagaaaaaaaaaaaaaaattatctctcaaaaaagttgtatatgaaacttttttttatgttttactaatatgaagatgcatagcatataacggacaagtaataaaatattagttcccttttcagggggagtttttgttaatttttgccaaactcttaaatccatagataactgactgcaattagcaaataaatagagtttcaatatgaatattggttactatttttatatacgttagtggttaaagtgaaattaaaacctttacttgttcaccaatgatacactcttctgagaatcataattttttaatacaaggataatatgtctgtgtatgttggggcagttcataatgtaatggttacagacataatttaaaaaaaatttgcattattaacatacttttattcattctttatttttacttttattaattatttttattctacacaattaacaaaatactaaatcgaaccctgatacgcggtgttaattttcatgctgtaaatactctcttcatgactgaattacaagctacaacctgaggccattaataggaagttggagagatgcacattagcttgccattatatagtgttgccacgatacaaacatcatctatgtaaatatttttggtagcataaatcacagcaaaatatagcgaaatacttaggaaatgatgaatttaagtaatttgttttccttatttttaatataatttaattataaattaaaaagtttatttttaataatttctgtgtctaaaaaggacctcagaatatttctaaaaatttaatagttggatctcatgagttgatatgagatagctctcaaacacaattgtgtataactaaaaagtctagaattatagctagttttagagtcaggaaataaaatgaagtggtcagaattttaattctctcatctagggaatagctaggatttaattttacatctagattgggtcacatgttcatatctggacaaattaattacaaccatccagttagaatacactagtcagaactgggtcatggacaacttctagaatttgcagatttatcaggttcacctaaaccacattgattcaaacttaaaaacattattccatcaaagaaaattggcaaaaagaactgctaaacatttattgcatactctttccaaaaatatacacctacagtataaaatactaactagtaatgagaatatgtttattgaaaatttactatatttcaaacactgtgctaaaaacttttacatattatctcattagataaaataagactatcattaatattatttatcttcattttaaatatgagtaagtctctagttatatttttctatttaagatcatatatggaaagtattaggatggtgcaaaagcaattgtggttttgccactaaaagcaatggcaaattacttttagtttgtcatagtagattgtaatatgtgttaaaatctgtattccaatcttgactccaaaacttacatttttacatatagaatgcaacacacttagtgaaccccacattctcatcattaagagtccattcacttttgttcatggcactcttgatcatagtgtcatagaatattttagctgcagaagaaagctacccattgcctagaacatgaaaataagtgagaggtactatgaatctaggataaaaacagtagaacatggttctaatgtatgaagaatgtcttctttaggagatcaataaatagtaagttgattagacaaaaacatgtgattgactaagtttgaataatgaaaaaaagagaagactagagtggcaagtaataagccgaagctggggacacatgaaaaattagtagaaaaaaacttatcgaaagaaaaagttgcaaatgcctttatttttgtttattttaggtctatatggcttgattaagcttttcttcccaaatccatatattccaggtagatacagtgaacttcattagatttgcttccaatagtttgtagtcattgtttaattggggaatttactgctactccaaatatcatatggaatcccagtcatctcttaatgtcttttttaaaaatgaatttgccaatattttataggtaatacaaggccagaatagtaaaatgatccaataaaggcaagctaactaatcaattaatctgaaaataaaattgtcacctgaaattctactatgtaggggtcattgctgttaaaacattagggccctccactattgtggggccaatttagttctatacactttctgatattctcaactgtgtcactataacttgtatcccttgtcccgaacaccaagtctttttcttattcttctactctctctaattcttaaaattagacccaacattgtctgaaggaagaacttggggctgggaattaggatcttatcaatgaaaatgaagtaatctaaaggtcactggatatctttagatatttatttacatagatgaaatatggctagcaacatagttagaagcataagatattgtgaacagaaaataagaagatgaaattatctcaaataggaagtataaaaaaaatcaaggacatcggaagtgagcctgggggagcaaagtttactctatcttttaaataataattttctttatttcttttaataatacattctttagaaatcataaggctaggtattaaaacttgtgataccagtgtgctcaaattatgtctaccattggagattctcacttttattttttgaatttatattttagaaaaaattacctgtccctgtttaaatgtatattcatcccaatataaaatacataaataaaatgatatagactcaatactttaaaaaaaacttaaattctaacattctgtagttcttccacatctcatttgtaaaacaagtaactgatttttaaattaatgccctataaataggttaaatttatttttaaatttgccctccagagaaaagggttgtagcattttatttttaacacacaaaatctatctagatattgaaaaaaccttgtcattggcagatattctaacagatgatctaaccactgatttttgcctatgatttatggcaattttttatttgaatctgtaggatgtaaatactttttacgctgaacaagtcaccaaacagtacaagactttaagctaaaagtagctaggaaatacatagggaatcttaaggtgtttgaaacaaagattttacgacgcttatcgtctgctgaaagaaaaaaaatcgtttcttcatttctgataatgtcagaatagataggccattgttgcacacataactgagtctgactgtaagaatgaattatcccaagtgaaatcctctaaatgcttacttaacgctataggatgaaaaattgcaagcaagaaaagttgaaaagcaagccttgggggaaggaagagagtatcaacatcacaatgaaatctgcatttggcattttaagtaggatcctgtagcaggatgtagaggagcctgctgtgtttaaaaatgatcttttgcccttgtgtgtatatgtttcagcattgaaataatcagtcctctttcaaatataatttgatagcataattaaagtaccccactagcacaacttttgaagctaaacttttcctttttcttgtgcacttagaaattttttcacttgtatttgatagcccagaccaattgacttagaattccctgcttgatattgtaaagaatttacttctatttatgtcttctaacacataaaatgttctaaactgtcacctctagttatggtagcatgtaggcaatgaagcctaacaggacatctgactaaactagatgtgacatgttagtatcacaatacatcaaatttgatataatgcccttttttcactttacattataaaatatgattttgctttttcgtactttttgcttttctttttagattcagtaatatataaaaatatcaagtcttaaaatttagtgaacccaagacctaacgccttgaagtaattaacaaataagacaccatgtctttgcctgtgcatatgcatttaaacatatttattaatacagtcatgttggagggcgtgatttacacagcatcttttagatattcagaggttactttggagcagcctatacttttgacctttagcaatgttcttgcaaaccagtcattcaattctactggaatgagattaaaacaatccaagtatggctggtattcatatgcttctccttgtttccctctcccctcccaccactccaaggctctggtaaagacatttttgtttttgttctccagtctccttatataggtctaatctattactctttattcaacaatgtgtgtatattgtagtgactaatttcttattaattcctctaccgagactcttctgcaaaattcttgagaaaatgaattcattaattcttcttaaattctggttgccgtttatggttggcccttagattttgggattcaagtctaccattcacagcctagagagacaaacatgatagcagttgttttcttttggataaaggagttaagatttcttccatataaacagttggggaaaaagcagacatatttattaggccctatttaagagtttattcactctgtttaaaaaaatcattaaaaacttcaaaagaaaaagcaaagacagtgtggaagtaactttcaatgctgaacattgaacattgaaacttgaacattaaagcttgaacattggcttacaaacacaccaacagaacaattattatatgtatgtaactttgactgtatgaatttacatgccaacttgtagatttctttgtagaaaagaaaacatgaaagattaacgtatggttttatagaccgttaacaagagctgtattttatctaccagtcttattttaacatttctccccacatcatctttgtatgccagttccacaaaatgtattttaaaccagttttaccttctttttggttccctcattaatgagttgtatataatcttaaaatatgtttatcctaggtttgtgtgagaattatctttttagtattaaacttctaacttttggttatgccccagataacagaggaaaagaaatgattatacttgaagcatttttttattccaattaatctccgtagtaaatctattaaatttagctcaagttacatttgtggaatgactacttatacaggtaatgtgatagcacctgaaaggggaaaggtttccttgtccctcttgcagggcatgtgacaggggaagtggcttgcttcttcagtgccctgctgctcaaacctctcgaggaggatacagatgggcaggctgcagggctccgaccccacagcagtgtccaggggtgaatgtttacagctcctgaagccccagtgggtgagtgtttatagggtgctcttttagttttgccatctatagggttgtgttaaccaactcaattacacgccctaccttgctgcaaggacagagggctttctgtaccccaggttcttgccttgatgtactggaagaattggctcacacctgggcttggagaatgagtgcaaggttttatttagtggcagtgtctctcagcagatgggggagccagaagggagatggtttttccctgatgtggggccgtggagcttctccaactgctctggccaaattctgcatcattctactggccgatggcctgctggcctgccggtatcttccacctgcgtgctcctgttgacatcctctggatgtctatccgcttgtgtgtctgcctgctagggtctcagagatttttatacatacaggatgggggcatagcattcaagggtggtcttaggaaatgcaacatttgggcagaaggcaggtgaagccctagccagggaccatgccctcctttacccagcacttcccttccccacttccgtatcatttaaagggatcatgcccttcccttcccagcactcccatatcacagctactcataaaaagtgtctaccatctggtcgcttcactccaagagatccacgtaagaaaatttaaaagaagatatacaagataataagtgataaacatttatagatagttataataaaatggatcataagaaaggtgaaaggctgtagaaactgattaaataaaaataacgttatctacaaattcagagaatataccattcatactaaaaattaagtgcatattcaacttatgttaaaaatgacactgtaaccactcttctactctcgatgaagtcaacttttctgtcaaatttaaaggatgatactgtacagcatttctcactaaccatattttttcagcctttttctttctactctaacagccctttaatgttctcaaaattcttggctgatgcctcttacttaatgcaccaagcattcaacagtcagctacttggaatgtgacgggtatggtggatatggatgtttcttcagccattaaggacatcaattgtaactgaacagtaaccacagacaaaaaggcttatgagataataactagttctccacaatttaacactctcagtgaaaaccacccatgacttaataatgtaacattctttattttggtagaaatatgaaaaaaatcagattcataatacatttgtcttgaattttttttactcataaagaagaattttatcaggaacgctcatgacttctactgcctcagctttctcttaggcatgattttagatgaaaaatgtttcttaaacgaggttttatattgatctcccattatactcaagtagtccctaacataaaaaactcacaagtacatagtaagtttgaagataacagatttgtaagtttgattttcaatagaaagtactttatcctaatttacttagaagagaatagcatatttagaaatgaaaaatagttttcactttttaatgcaactagttaaaaatagttaactgattctcataaggggaaggtattttgtagtacttaagacaaaaatgatatacttgtaaatattacagatacattttaaagttgacagagtattctcagccattttaagttataatctgtcaaagacaaaattatgccactacagaggatccaagattataggtctgatctgtcagtcatgaaggtttataacaaatagtatagattgaagcagatcaagcatgaagtccaagaaaatcgtctaatgctctgttgtattggcaaattccaaaggtgtggagactataaaattagaaagtggcaagtgaatagtttgagagactgtgggctcatcaatggagacatgacataaacaacagaattactttacaaaaggaaaatggacattttccagagactatcatcccacctctaattgctttaactagtacacaaatgacttcctaagatgacaagtatcaatctttcatcaacctttctctgcagtgatgcataaaacagatgatgttaagatatccaatggaagtgtcagggtcaataacataggacataataatataaaatcactgcagtacttattccactgttagaaaaaaagataacaaaaaataacataccagattactggcgttgaggttgagcatgactttgcaggaatgaccagggcctaaaatatgcctctcatttatttcaatgagtatttatgaagccaaaactctcttcatatattagacaaggtgttggagaaaaaagaaagaaaagagacgtgtggtccctccctgctgtcacaaagtttactcaagtaacgtgtactcaagcaaggaagcagcatagcatattgcaatagtgtttcaaaaggaaaatacaggttaactgcagcagcacatttaggagaaaacaattttccaggaaggacttttggagacatagtcattacaggagtaattactcatcatacttaatacatacatacatttataataggttgtacttttgcatactacaattcaaatgtgccaatttatttagcctataagagtttattttctttagtctatatgactttatcttgccccattactcctattatttaaaaaaagagaagaaaaatacatacatacatatgcatatacacatctatatgtatatgataactcagtctctactgatttaaaaatagttaatactaatcaattcaaatattctctcaaagtcaaccaaaattaatagcctctgctcagaaatcatacataaatctaaagtcttcacacttatgctgtaccttcatgaatttttgtttatgtaaatcaatattttatgccaaaaatagaatgcttcttagaaaataattgaaagaaggaaattcattgtataacagaagagtagcagttgattgagacaaagagattgttatatgcatgagttaaaatgcttaattgtgttggatcctatatcagaactaatttactctctttttaggttagcattgaggtgaatcccttgatgataaagccatgtcatcacctgttttactctaaacaaagacatttataaaaatggtaaacctgattatatttcatagtattcagaaagattcttgtgtaagattattaatttttacaatgctcctattgtcagctgaggtaaaattaattagaacaaccgtatcctaggaaaatagagtcaatgagcaaagattatcacatatttaaaggaaataagagcagatgaaagctgttcctgaggaatgaagtaaagagagtttgagacggtggaagatggaacaggaagaaaaaaataagataaaatggtgacatctcttaaaattgttttggaagggtcatttacacactatggatgaatagcaacttattcctagaaaatgcttgttgcctaggttgtgcaaattctcagttatggatagatttagttattgatcaatcatactgctttcgagaattttaatctgtttagatttcttaaaaagttcccatgtatataaacaaagtccatttacttgatggcattatattagccttaggatatttggaggacttgcatacttggagacaagggcattccagatgtcagatgttttcaggacaaccctctcacccagtgagacagattgtatgttttttccactgtgacttgctccgatttatatttccttcagcccagaaaggattattgtaatatatcaagttcatcagcattttttaaattcttacattaatctatttaagttgaggttctattttacctcaaagatatctattacctgtatttatctatccaatcgagttcttgccacatatatatacttttttaattctgcaattcctctgaagtttttaagagatctttgcttgctggttagaataatcctcaagtttttctaatcatagcacttttattttctcattcttctgattaaaattctatcctcttcatttgcaaaggtgaatatatttggaactgtcatctccaatgaatgaaaagcaattagaaaccctagaaaagatatttgaaataattattacaaaccattttataatttgttaatttttccagatttctataaaaagcaaatgcaaataggaaagaaacaagaactgggctttcatatattttccaatctgagctgacttcaagacatgaagattaactagtggtaaacaagagaaaataaatttaaaataaggaggacaaatgtagaagttatcaaagattacaattttttaaaatctcaaagcttttgttgaaagaggttcccatcaaaggaatttgtatcaaaaagaaaatgaataaagctgaaatgtaattagaatcaatgagaaaatatcagagctggaaggacattaataaatccttagtaaaaatagcattatacagatgaaaaaaagtcaggggtcaagaaacttaattgatttgtctaaggtcatgttatttgtcaatttatttccaagaccagtgtttctccaaatagagattaatgaaaagaagaaagaaaaaagaagaaaaagcagttctccacattttttttttttttctgcctggaggtcgtgattcatttggtgtggaatggagcattcacatttcctgtttccttggctaacagcagaaaactattaaatggaagaaaataagatgtgaactgaagtggcagaaaaaagtaaatgaaaaaaaaaacagaacaggagactttgtttttggcagttttttaattatacatatatctccctcagcagccacatgaggagggccggctgggtctttctccattctttgggcgagtatatttcaaaatatgtttaagagactatcacatccaaatcaccagaggggagatcgtagctagtcccaggcttttttccacgtaacttagtaaaaatctctgtgaatagttccccaaattctgcatttttaacaagctccccgcttatggagctgtctccttgagtgcaggaaggacaggctgttttactttataactgggacagcaagtacagatcctggttcgtaggaggtgcctagaaaatacatgataggtaattagttaaattgaattaataactataataagtagtaaaacttaataaatgctagtatttttttaattgtatatatctactactagatacaaactttgagtggtggtgttcatttaccaaagttttggtttttacacttttccaaaaaatgtcaattgctattctgtactctatacaatcagaaggaagtcagtttgagcacataaaaatgacataataggccgggcgcggtggctcacgcctgtaatcccagcactctgggaggccgaggcgggcggatcacgaggtcaggagatcgagaccatcctggctaacacggtgaaaccccgtctctactaaaaatacaaaaaattagccgggcgtggtagcgggcgcctgtagtcccagctactcgggaggctgaggcaggagaatggcgtgaacccgggaggcggagcttgcagtgagccgagatcgcgccactgcactccagcctgggcgacagagcgagactccgtctcaaaaaaaaaaaaaaaaatgacataatattctgcagtatcaagaatacacagcttgatacttcagatttatttttatctttgaaagatattaataaaataagtaatttataaaaacaaagagattttaataactgaaacaaaaatactaattatgataagactaaacatgtaatgtagctgtaggttgaaataaacttgaaacactctagtgtctgcataccttttgctttccccaagaactatttctgcaaaatattcactagcctgcagagataacccacatagactatgttattaatatgcaatcttccttcctgaaacagtttacatatgcagtatatagcatctagaccttgtaattgaattttcaaagtttgctgtggtttgggagctgcatatgggtcagtaatcattatccagacaccatcatttatagtacacatacaattaatcaactcattaattatggaaagagtctcagggaaggctagtacacctatttcttaaacaaatatgttacccttgagctgtaaaagtagcatttccatcagccattgccttagattattgttagatatttgttctgggatcttttaaaacaaggcccataagaagagtcaatataaaaatctttcagacataaggcctgtcgtatatgttcactgaatttaatcactttctggttaactcactgttcaagtcagctttggatctttatcttctgaagctaatgtcaataacaccttatttttaatttaactaaattcagccaaacgtaggagaaacaaatcatgcttcttttcattactagttttagtagattttttgccagggcaaaattggtaattagggacagtaaagtattcttcaaatatttttttcttgttatacatttgtaagcccaggaggttgttaaatggagacactttatggatgcagaaaggaaaaaaaaatcagtaaatatatcttttcacattcttggctcattagctaaccagatgaatttcctttcctcttcgtcaatcccactcttttgctattttttccctactccgagcaatttatcttcatgttgcactgactcacattatgacctacaaaactccttgtaaaaagacacacaacagaaaaagaggctaattgtgtaagataaatgccaacctaaaataatgataaaatataatttgatttcagcttaaggaagagagaggaagggctagttatttaatagagtttttgttaaatatacggtgagcttaaggaagaggaacagctgtttgccatcttcattgaagtcagatgtagcttagacttaatatgagagacatgaagaagagatttttgtctatagatttctaatgggaattttagtcagaggaccatgcaaccatagaattttatttcttgtaagatgtagagacatacgagataatttatgacccattcaacttaaaggtaggaggaaagatcagttggtattttaagggttcctcttttccgataccacattgtcctgacttctttgagcctcagttttccatctctgagctcctttgatttgaagttataaaataccacagagttcaaggcttacacttttagctctttgggacaatgtctaggagagcatgaggaatgaccaagagtaagctgagatcctgaagttttagagtagtctcttttgtctcaaaatttaaccctttcaagtgcttttagtggaggattgtgcatgaaagagacacctgcttcttattacctagaccttgtctctatctattagatacatttctatctcaccgagttacactcccaaatactaaatttgccccagttctccctgtgccattgtttcatggccagttgtgaaattttgttctccatactgctaagaaaataaatgtacagtgtgataagtggtgttatgtaaaatgtgggagtggtagactgaagaaagcctctgggcaaggaaaacataaaaaagtcaacaaaatgcttcaagattgtttgttttaaattgttataaagaggaaacagaacataaaaatatggtatgtgaaagtaaagaatttcatggaggtttccaactacactttagttatggatatcttttttttttttagaaagaaagcttttgagctactttaacatggaccttagataagaactgaagttcaattggcaaaacagtaggaaatttgaagcttcgactatacctcagggaatgtggaaatagtttcagggaccatgcatttctgctcacataaccagttttaaaaccatagccctcaatgttacagtcaagatttgatgtagcaaaagggcataattatatttacattgatacctttaatatatagcaatatattatttcttcaaacaacataaatgtagaccattagtattccctttatgtcttttgccttaaaccagctatcatcaaaacacaatgtaatgccagtaaggccatgagaaaagaagggaagtggtattctggctgcctaattcggagcaggagggagggaactaccacctatcactccatgtatatgcagggctgattaaaccatgcaagaatttctaaaatgaataagtagctaacaacatcctgtttcttctacttaaattaatgaaaaaaagttttgagatttattttagggtttattacccttttcttcttaaaatatccatttctaccatctctggagatatactgtcttacttatcccttaagtctctgcttttattagtcaatgttcataattggaaatatctttccacctccatccctccttcaagattaaacattctatgaagaacagggctcatgattggtaaatattcatatatctatgttaacttatatgggacaacgtattagttgttaaaatatgaatgtatcataaaagacttcctgatattggaggcttcacccatgagtccagacaaagacacacctattatacaacttacagtttcacaactaatggcccatgtctaaaaatgtaaacttgaagtatatctttaataattttgtttttgaataattagttatattttcaggtgtttttggagtctgttttgttttcatcttttttattccatcaaaaagctcacagattttaggaatttggatgtgtgctataccagtctagataataaatgctgattacaatgaaaatactaggtcaagtgaaaactggaatcaagtttaaaattatttttatatctcttcatacttagccagcaaaatacccatgctagatgagattattgttcaaaattattgctgtcttcatcaaagcagctcatatattccttgctaatatcatgtaacacccactgcttctctgtgggaggaaaatacttcacaccactactgtcagggttgaggatgtgactttgttggtgcctttgtcagctagtgctgtaataagaaactactgtagactaggaggctaaaacaacattgatttctcacagttctggaggttggaagcctgggatcaaagtgcctgtagggttgttttctcccaaggcctatctccttggcttgcagatggttaccttctttttgtgtccttgcatggccttttttctgggtgcacacatccctggtgtctcttgctttcttcttagaaggacactagccctggccaggtgcagtggttgatgcctgtaatcccagcactttgggaggccgaggcgggtggatcatgaggtcaggagatcaagaccagggagaaaccgcatctctactaaaaatacaaaaaatttgccgggcgtggtggcaggtgtctgtagtcccagctgctcaggaggctgaggcaggagaatggcttgaacctgggaggtggatcttgcagtgagctgagattgcgacattgcactccagcctggggtgacagagtcagactctgtctcaaatatgaaaaaaaacaaaaaaaaaaacaaagaacactagtactattggattagggccccacctttatgaccacatttaacctaaattgcctccttaaagggctgtatcttttaatacactcaaatgggctgttgtatgcttcagcatgtgaattttggggggacaaaatttagtccataacacctgggctaatggaacgtgatttaaagtttttgcaaattctgagtaaaagatgaaagatccatttaatggttgctacagttctcttccctctgccatgaggccaccaggtactcaaacaacgctacctctttaccctgggctctggattaaacaggacattgaacagagcggtagtctacttgttagtaccatgtaagaagaaaatcaagtaaatctttttgttttcaccattatgattttgagactttcatgactcttgataccacaacttagcccagcaagagctaagtaataaagtaatcattacttataaatagaaagcttttattaaattatgtggctttggttttggagtcaggcctcaggcagcaagggatttattattaaaggttgaataaaatgcagtaacaaaccatttggtaaaactattagctgcaagtacctaaaaggcaattgattaagcaaacaggctcctggtgatgttactagcatatcactctctcccccaaccactagttagctacatttactagagctacaaaaagtgcttgctacaagaaaaagatgagctcagaaaaacactggccagtttagaagaattaaaagaaagaaagacagaaattatcggacttgcaggattaagagtaagtatttttcatatccaacttgtaaaagataaattaagaaatgttttgagtgacaagtcccattaggactcagtctttgatttagacaaaatccagagaatagctttcatatcctcgttgaaaccaactaattaagcaacatgccataattcctttcagttggacaaaagggctccatgaaaagagactaaggatggacttttacatgaaagtctgaaaatttaataaaactctatcttaatttagagataggcttgcatatgcaaaatatcatggatgtaactacaggtatgctaagatgactataagacaaacaattttaaaaattccattgcagttttagagaatggttctgccaacagggccacagtactagattcaaatggactatggcaatttaagatttaaaatgactttggaacatctaatattctacagacagaataaaggttagaaaatgtattccaatctcccttgctcccccagaaggaggacatattttctagagtcctcttcagattttttaatagaagataaaggaaaaggaataatttctcaaatgttatagtcaagagttttggagaataagagataggggaactactgctggggagcatagttagggactttgatgaaacattaagacttcttcaggtaagatttcagaatggcctggtcttctctgagcattctagtctaccttttgagaatgaaagcttgtgagtatgtgtgtataattgtatgtgtgtatgtatatgtgaatgcatgagagaaagagagactcagaatagttattataaaacactcatattttttcaaaatttcacaatatatatatactattacagtttttgcattatttgaattttacctgtgtcagtgtagactttgttaaaattattcttgaatttttctcttatttcactctctttcaattcatctctctctttctctctgtcatataacacacacacacacacacacagatggctttttgtaataaagaaggaaacacaactttgagctaagcagctaaattaataggttggctgagttgacaatgaccttcatagagaaatctaaaggagagggaaggtagcattctctgtcgaaagagtgaaacctttgtcagttattttatggtatgtcatttttttccttctttttttttttttgaatgtttgatatctatttgaccgtcagttgtaccaactgatattcacatggccttgtaaaaaaataagatttttattataactttaaatctgttaggtcctgagttcaagactcttcaggaacggaatggaggatagtatgtgagtgtagagtctaatattctcaaagaaaaacggaagacgagacagaatggggcatgttggtagacatcttcaagctcatatttttgtgtttggaggtatttataaatggaagtttctaaatcctcttgttcttgaaattgtgtatatttggaacctacttttcagtttctcatcctcaaaaattactttaaatttaagaggacacatttataattaccttataaatcaaaatctaaaattttctttttatatgttaaatatttatttgttgtttacttatttatgttgacaccatagtgatgtttaatttattatgcttctgaagtagcttcttagtacatgatgggatatatttaatactgcagaacatttctgtactagacatcacactgcctaagttctgcttatgggcaatatcaaacagtctactcctctacaatgaggagactaatgggaattcaaagagtaaaaaagacattacatcccagttccttcttacactaagctcatctgagaatcattcttcagctacctattgagcaagttgtttattgttaggggcctctgtggaagaggaaaggagtcactgtaattgaaggtgtttatctgggaaggttctgggaatttgagaaagacgagatccaagcactgagccagtgggaatggaattcagtgattggaaggcagcataatgggaaataagatataatgaaggagacaaagccaacagaagtaggaacatggaacaagctttaaacaattgctaggagaaagcaaactaggccattgtatcaatgtgcctatgcaatattattgtagcttgcaaaattacaaaaagtaagaacctccttcagagagctagcacagggacattaagttttaagtagcagaatcaaattcaataagacaaaaatagaaactgcattttatcttacaattaatttcaaaattaaatcaggcatctatgctatcgggttgactatatatcacatacttaaactcaaattaataaatattttttgatagcttgctatatacatgtaataaattatagtaaataaatgagagtaagactcagattttcagaaaattacacttcaacttacggggacataaatcaatgtttggataactgaaaaaacaaggtatgccaagttccatattaggcatacaaagagataattaaagggatgcagtggaggaaaacaacttatctagtaggaacacaaaagtttttttaaaatatgatatttgcttggaaataaaaaaagaaaaacctatatagtaaaaagaaaaatggtggatatacattctatgcaggaaaaaatacgtaaaaaagttcaagaattaaaatagtgaatatattctaatttgtcaaaataattatacatatatgcatatataattatatattttccgtatatatacatatacacactatatatacagtatatagatacactatatatacagtttatatagatacactatttatacagtatagatacactatgtatacagatatatatacactatatatatgcacactatatatatacacatatatatacacacacacacacacacacacacatatatatatactcatgtagttgggactcctccaactcatatagttgggactatatatgtataaatatagtgtgtgtgtgtgtgtgtgtgtgtgtgtgtataaatggcaaaggactgataaaatgattgagatttatagcatttttcccctcattacccaattctaaactaataataaagtctactctcataaacccataaaataatttgggaaaataaaaattcactcttctcattgcagtgattacatatttattcttttatttctttaaccatgaaaaaaacattttgtacttttcacgtaacagaaaatgtatataaactactggcataaacaaagtaaagttcccatttttacaaagttcatattgtaatgagaaaatagagtaactgatgaagagaatacacctacttgacaaatgataaagtctttccaaggaaataacatttaaatggaaaacttaatgtaatgaatcaagtacaggaagagccaacaaaagaatttttcagaatttgggaagaaatacagagttgttagtgtgagaaaatacgctatggcaagtcacaagaaacaataactatgatattccaactcttcacatcaagtggtggagtcagtttcccctctacttgaacatggactgactttgtgactttcgttagcaaaaagaatatggtggaagtgacctatgtgccagttataagatgaggccttgacattgcaactcttgtagttgggactcctgctatttccatcagaacaagtccaagctagcctgttggaagataaaacattatacagaacttagtttatttatctcatttgtccaagccatggacccaaaacttatatgagaaagcccagccaagaagagccaaagtgaaatgcatctgatctgttagatgaccacggttgcatgatcaagtccagccaagatcaatctagcttgatcaagatcaaaagaactgcagacccaacatatagaatcttgtagcaacaaggaattattattttaagtgactaaattttaaggagggttgttaatcagcaatagataattgatacaatcttaagcaataatagattttttactttacattataagaaatttcaaattggctcaccctgcataccagtatcaccaaggacccagatgttctgtcagcttcagcatatttttgcttgttttttcatttgtttttattttttctctttacactgacagtgtttcttacaagatgactgatacatttcaaagcaccatttcttgttataacggcactcaaggtaggaagaaaagatacttcgatttctcatttctctttttttcttcaggaaaacaaaatcttacccagaagtcgctcagcacacttctggctaaaattgaatcatttacccactgaaacccatcatatataaaataaattgatatgaaattgaccaagttttaatgttatgatttactccataggcatgctgtcactcaaacaaattaatcacctaaacattaaagaagatggtaaaattgatagaaaaacaaaacactaacacattaaaaatatttaaatgctaattactctgaagtctgcatacaagttaagatgcacgttggagaagagggcaggatccattcatacaaagaaccgtaataaagatattggaaatatctttcttatttaaatatatttaaataagtgaggaaaaattatagcagcaattaaggagagtgatgaatggattataagtgagaaaaagaagaggagaatcagagaaagaaaggaaactaattaggagactacgttcctaagtccaagtgagagaatatgactagtgtgacatagattaagaaagctataaatagctaaaagtgtatggatttgtaatgagttttagaagcaggcttgctaatgaagcactttctgtcagggaaacataccactcaggatttattccactgtttgtgtcactggagttcttggttttgccatttcctaaaactgactgttactggggcaaggtttgagagagggaaggagtgtactgagaacgttaaatgtaaaacacccattagacatttaagtggagctgttcagaaagcaacttgatacatgaacctatatcaactgaggatttagtactggaaatactgattgagggttcagtatattgacagtatttgaagtaatgggtaagaatcaagttacataggagaaagtagacaaagattgcatctactagcattacttctccaaactcatctctcattccctaaaattgtacagttgtacaatatacagcctcaaatttcatatgttaaatagaatcctaaagtaaaacacgtgttcaaaggttaacatgctgcccactttcaaattttattgatttactgctattttataaaatgccttagagggtgtaagagttactacagcttttgttttttttgaggcagagtcttgttctgttgtccatgctggagtgcagtggtgcaatctcagcttactgcaacctccacctcctgggttcaagcgattctcttgcctcagcctcccgagtagctgggactacaggtgcctgcaaccatgcccggaaaatttttgtatttttagtagacaccatattggccaggctggtcttggacttctgaccttataatccaccctcttccacctcccaaagtgccgagattacaagtgtgagccactgtgcctggcccctaaaacttttaaataactgctgtgatttgcttcttgggagcatttagctcagtaagtaccagatcaacccaccaacttgtgatattgtttaatacatgtgaatatcaccattccggggaaatcttacagtatcaggctttgcaagggaataattagatgtgtcttaggagcttttattttactttatttcatatatatggtgacttaaagcagggtaacaatatgctgtgatagcacactggtatcaaaattttaaaaaacaatctatgtttgcagaactaagaccagttcaattttgcaagcatctggggtaagtccactctatttctatgaaacccaaatttcatagaaatgttcacagaaattgggttcctatgaaacccaaatttaaactttgtttacttacaactctgtgaatacataattcctcccatcttcattgctctcagatttataactgcttcatgtaattttccttagattaatttatgtagaattatttaaaaactaaaaacacaatttataatgaaagtgcgtattagttgaagttatattcattatttttgatacaaagtcacttaaaaattaatagcacacatatgatcccacaattccacttccaaatatatatttaaaaaaattaaaagcatggactcaaatggaaatttttacaccaatgttcatagcagtattattcaaaacagccaaaaggtggaagctatccaaatgtccgtcaacagataaatggataaaataaatagtttgcacatttctgatttacttttcttagattataataacttaattttaaatatctgcagagcaaaaaggcacagagattgaaaaatacattttggaaatattgcctttaaaggaatttctactattcaaattaaatataatgccaaaataatatttgttaaagcttaaccagggactaatttacaacataagcttagcttggaaaacaaacaaaaacagaccttgttctaaaatgaaaaccgactatttgacttaaaatttggaattttgagcaaataactttgttttagaattacatttagctattatttaccattgggcaaattcatgactattcatgaagtaaattagtttccctgcaccattcacagggcctgcaacacagtaaggattcaataattgtttcttgtttaaatgaaaaaaaaaataatgagtttataatatctagttactttttatttttaaattaacaaacttagttttttgaactgctgcaggcttatagaagaattgagtgcaaagttcagaaaattcccatatatctaccccactaacatatggtatatttgttcaaattgatgagaaaatattgaaatattaactaaaatccttggtatatatttggtttcccctttctggttgtatattttgtgggttttgaaaaatgtataatggcatgtatttactatatttatctatatacatgccattatacatttgcacagaatagtttgactgccaatcagtggttaccaaggacataggaggggaggaagagggatcaataggtggaatacagggattcacggtattcactatcttctagtttggccttttccagaatatcatggagttggaatcacagagtatgtaacctttgtcagattggcttcttaacttagcaagatgcattttttggacaaatcaggttgtcataacaaaaatggcataaactggatagcttaaaccatagaaatgtgtttcacacagttctggaggctgagaagtttaagatcaaaggctgacaaggtaaaatggccccttctctttgcttctcagtagccgttatcttgctggtgtgctcaaatgacctcttacttgtgcatgcatgggaaaagagagcttctgtgatatctcttctaataaggacaccaattcttttgaattagggctctacacttatgacctatttaactttaattgcctcctaaggactttatttccaaatgcagtcaaattgagtattagagattcaatctatgaattgtggagacaaaccagtatatgatatttaactcttggtctcccaaaattcatattcttttcacatgcaaagcatattcaccttttccaacagtcttccacatcctaattcattctagcatcagctctaaagtgtaaagtctcatctaaatatcatctaaatcaggtatgagtgggaccttaggtatgattcatcatgaaacaacatttctctaaagctgctgacctgtgaaactagaaaagttatgtggttccaaaataccacctaactttcatagtatgatgggacaggcataggataaacattctcattccaaaaaggagaaatatgaaaggagtagcagctcccaagcaagtccaaaaacaggcaaagcaaatttcattagatcttaaggttcaataataattccctctggctcaatgactcatcttctggactgattggggtggtgactctgcccccaaggccctaaatggggttgttgccaggctcaggtcttcctcccaaggccctgctggcagaggccatctggccagttgaaactaagccggtgaccctgataattctgaattgcctacagtgttatttttcccttgtcttgaaaaacagtgtatgtttgcagccaaataactctgttgtcctgtcctgtagaatccgagaagaccctcaggcttccttcactttatcttatctccatccccgtcagttcaaactggcagtgtttctgcctgtattattccataatctctttatcaagtgacagtctggctatacctttggtattctcttagaacatgctcttctcatttttttgcaacacactcaggttgagaattctctacatctttctacatttgattgtttttcccttaacaataccttcctcaattaatctctcttctaacatttaactataagcagttaggagtattcaggccacaccatcacattttgctttgaaatctcctcaactacctatctaatttcattgttcacaattttgattttttgcaaaacactagaacacattttagtcaagttctttgccactttataacaaggattaccttttctccaattttcaataatctgttcctatttttgtctgagacatcaccagaataacctttaatatcatgtttataccaaaattatattcatgattgtatatgctttcattaagaagttggaggctttctctctatctccttttctttctgagccctcatcagagtcaccattcatagccaatgtccatcaacagtccctccttggcaatgtggatttttttctagcatgcacctcaaaactcttactgccctctcttattacccagtgccaaaactgcttccacattttaagtgcctcttacagcagcattcccttctctgtaccaagatccattttgttgaactcagtcatgttgggagttaggacgtcaacatatgaattggggaatgtgggcatgattcagtccatagtacatttcaaatgccagattaatagaaagcatgaggaagttgtaatttgttattccagagtctgcacaaacagctgtcaccatgcttggaggccatttgttagattggtagcgtatgggccgccattgttccttgcggcaggcagagtgagttgatggtggtgtgctctcctttggatctccaattggttgtcatagccatccttcacaaccactcccaaattagtaaagatgaacctggaggagcatttgctatccctggtgtacagaagcagaaaagaacgaatgtaccagcagttttatcagtagtcaccatagagtatcaccctaaaatgagatacgagaatgttgaaaatgacactcctctgacatatggaacgatgatatagttatagagctgccatagtgacctatacttgagaaaagcctgacttccaaactctatatttagtaattccttaagaagacaggctcaggtattttttcaagtgaagcagaatcccacatctactccagggaatccaacatcctaaccagagctggaatgatgtcaaaatataactttctcctttcatgagcaaaactctttatgtgtattttaattaatattatattttctgcaaattcttacttcatggcacaagaaagtcaaatcagataaactgaacataattttacagctgtggcagaattgttttgccatttctgtgagatgtattccttctaagcatagtatatagacgtataattctgattatattattactttgtatctttccctagcaaaaattaattaatttctaatagattggggtatggctttcacctagtataagaaattcaaataataaccaaacagggaatagtttccaaatgagtatatgaaaatttaataatatgtgaatttaaatattcttttatatatatagattaagtattgtttcaataatttatcagtcatttaagtagatgctactgtaaagcaggccatttcaaatcgtataatatttaaaatccataataagcataccaagcacatgttatattaattttatagacagtaaaactaataatcaggcatattatgtctttacaaaaggttttacagacttcaaaaataattataccaggatctgaatctagaactttttggttattggtgtgtctgtatttcttttcttatgcctctaaaaatgtatagtgtcaggtaaaaattaataatacaaaaatagttatttttggtatttagcaaaatttttataaattacttccttgagaaagggaataaagagtaattgtaacacaattttacaaaatctctaattgccacatagcagttacttacattttatgatgctgaataagcaaaaatttattttttgagatccacaagattgtcttcctataatttctaatcatgtggacttaggtgaaaatctctgtggtataaggctccagtgtggctcctgtaatccctaccttctcgcgataacacctttgtgctcttaagtgtgggcaggaactgagttacctctaacagtagcaaatggcaaatatgagaccatgtgattatgtgaacatgattacattacatgagattgtaactggtcttgctgggagactctctgtcattggctttgaagaaataaattgtcgtgttgtgctgttacatggagaggatcacagcttacagagctgagtgtggccatcagctaacagctagcaggaagctgaggccctcagggtaatagccttccaggtacttgatgaatactgtaaggaaccatatggatgtggaagaggattcttccccagctgagattcaggtaagaccatagtcttggctgctaccttgattgcagccttgtaagactctgaagcagaagagtcagctaaatcccattccaaattcctaaccaacacaaaccataaaataattcacttgctttgtttaatctgcacatttcatagtaataatgctgtgtgtcagtagagacacaatattatttcttacatttataccttatcatgctttatcactggctatttatactatcacttccagaaattttaataagaaataatttacatatacacatacacaatcatatatatgtcttcacatgcccaaacacacagcgtatgtgcatatacagttgtttgactcagagagaggtgtatctgacacttaaaatatttatttctaaaatatgcatttcaaaatatatggctgggctaattttgtctttaagtatctgcccttggaaaatgaactgaattttcataagtaatgagaaacctgggtgaagctctcctagaagattggccaaaaagtgtaaggcctgaggcattgccaattactagcttccagaaaataccagatgtagaggtcaccatttttattacaaactatgaaaataaaacatgttttaaaattttttttgtgcgatgaaaggccaaaagctgaagtatgtgtttgccatggaaatagtgttttgtttacaggacttgtcttttctagaactcatccattaaatggtaggagagaaccacttcaatcttgacattgtattgcattcggagctttcattactagaataatatttgttcatttttcaataagaagcataaaatgttccattgctcattttgtccgtttgtttaatgacattggtaggcttgttacttaaattaaatccatctaaagaaaatgaatatgtactggttaatccaactgaacccatgtaaatacactactgtggctctaaacattggcaaatataacaaaccctcactaccatacaggatggaatgttacagataatgttctgcttcacaaccaatgacgatggtgccagaatgctcatgttcttgtttttcctactttctgataatttgtactaattaagataggactggcattgcagatgtagcaaccaaacattttatttcttcctttcacaaaatcactctagtccgggtgagttttgggggatttggctgctacacaggaattcattgagtttgcttttgtcttccggttccacagtctcaacacaaagtctcctcattgccctggcagaggaacagaatactggagggttttctactgacccaaagggacacacatgatttctactcacagctgtttggctacagcttgtttcttggtcctggttaattggaggagggctaggagaataggaaagtgcaggttgcatttgtcaagtgttgttaatcctctcacatctatcatccaggtaaaatttttcactgatctgtacccacaaaccagggggagtttttttttaaccaccgacaagcctgttcctttggtctgttgcacttttgaatcttttggttctcttttctttttttttttgtattccctgacatgaaataaaattatacattttatccttgcgatagtttgctgagaatgatggcttccagcttcatccatgtccctacaaaggacatgaactcatcgttttttatggctgcatggtatggggggaggggtagggatagcattaggagatatacctaatgctgaatgatgagttaatgggtgcagcacaccaacatgacacatgtatacatttgtaacaaacctgcacgttgtgcacatgtaccctaaaacttaaagtataataatacaattaaaaaaattatacattttataactttgtcaaattctacatgctatttccttgcttgagcttagatttctcttttttgacctaacaagcccgtaccattttaaaattcagtgtttcagtgctacttaaaaatagaaatgctccttttatccgccagtcccttgctgtcataatactatatgttaagtgaagatttattatataatttatcagattgaatatttctcatgtacattccatatctgtgtgtgtgtgtgtgtgtgtgtgtgtgtgtgtgtctgtctgcctcattctttaaccttgccctactataaagaataaggaatgtgagtacccatgttacaactacctgtgcttcaaaaagaatgtaggttacagtatttacacagttaattgttgaaatagctaaagaggttagcatcatgcttatgcatatttaagtgctcaatacatagtacctttcatgaccatacaaaataatatttggaatatatgattacttacagtgtacagacttggtatattacttctgtaactttttacttattcatagggactgttaaatcatataattcatttgattagatagcattcacaacattagaaaattaaacataaccactacaatattctacacttttgattacttgtttttgattctttgtctcctaggcaagagaaatagtatcaacagaggaatggaattataactagaaattttattttggtgaataagctgaggacttcctagagaagctgtatgatgtgaaatagttgcaaataatgacaaagtaactcgtagataagttactttaaggctttatttgttaagttactgcatagagttgcaaaagcatcgacaacatatttcctcaaaatgtagagtttacaagttttctgagctccctgaagtttgcaatctattccagtctcagtgtcctctaattttacatcaatcttctaatgatctagattgcccattgcatgcagctatcttttcatgtttgatttggttaaaggaaaatcagctttacattgtgaaaatgcatattgttagcgaattgtgaaattgtgaggaattgggctgtaattactgaatattggctctccatgaacatgttgctaaaatgtgggaagatgtgccagagaaattgtctctctcctcagtagtccatcgttacagcaacaattgtggaaatcagatgagatgtggaaccatttttgattgccttaaatggcgcatttgtatatgccagcaagaatctatgcttctatgtaaattgaaaaagggaaatgaaacagtctgtggatgtggactctctcaggttgaacgtaggtggatcagcttgtactcaacatctgttcaggctggaaatgcagaggaagtttaatatgtttactcaatcatactggtttcctgggtgccaaggcagaaaatctaaaacatatgacttctgttcacactatgtgggagctatttagaacaaaggtgatgatcctggaagaaaatgtggagacgctatctcgggtaccagcacagttggacttctttgctgccagcaatcaacagcccttaaacatcaacatttcaaggttttgtcgaccagtgtaccaagtaacctctaaaaacatttgagaagaaatagaaaataacactagattatttcttaacatatcaaaagattatcaacatatggccttggatgcttttcattccccatccttatatgtccatacaaaattataatacatttaatgtagcattccaatccagatagtagtttgtggagttaaatttcaaactccctttttgaaaatttccttgcattcataaacacgttagctatccaggacagcgtgttgctctaggaacaaaagtggggacttacaaagaaggcaaattataagaaatatatttctgtcaaaattttatgaaacaaggaaaatcataaaataaaaattaatattagaagaaagtcttatcaaattctatataatgatttttcatcaatatacttggcctctaattagttaaaaggaagatcatgcaaagcccagagtttttatcttgtggttactattcaatttaaattctcatattccccaaaatgtccttgttttagttggtaagacagcaagacagtagctacaattcagtggaattaagtactttgccatattccatgaaatacacaaggagaggtcagaagaaacacaattatttttgtctggcagaatacaaaaaggtgtcacagagttggcatttgaattggattttggaagatgaatggaaatgcactagctggagatgaaaagaacataatggactgaggaaagttcctttccaaaaatcaagaaagctgtaaaaggcacggggattttaataattatcttcagttggaattacatgtatgttgagtgcagggacaaaattgaaaaaatagttatgcctgaaaagttatatgggaaattattatcaaaggctattgatgtcaagctaagaagattacattttacctaaaacacctaggatctttaaagtggatgtaagactagttcctcttccccattcttatgttttccatattgtcctcctccttgtgaaaaattccaccaccgttgtcaacacttcactttatataccatactaatataatactttcacccatgagcagaatggatgagaacattctcagaaataaattaaaattactacatatattgtgtttgaaatggaaaaccatgaatagatacctttatagtaataaattaaatcttaacaggtgacttgcagagaacatggtaggtggtacaaaagtagcaaagtggggtggggaagtttgtaatttctaagcaattctctaaatatatttatttagtaatcatctagttctggtagagtgacttaactgagcgatgcatttcagaaacatggcttacagaaatcagatatttaggatagttataaataaaatacaacacaaagataaggcatcattatatatacacacaggagcttcataattacaattatatttgtaaaagtataatgtttaattatttaattgactaataaaattacaataaacaaaaatgactgactttaaagatatgacttgtataagcaggcttgtagttacctacttaatattacataaatttatttaacaagtaaatagacaaaagttacaatatgaattttaatatatatattatatatgtctatccactttgaaagtatgtgaatatgtttaacttaaataaataagaggataaagaaaaatcggtctatcagataaaaaaattaatgatagaaaaataagaaatccataaatgatattaaagcttcccttctctgttgttgcatgttatgaatggttctcatatttactgaagaactaaggtaaagtactggttttgtaagggtgggacatactgaccataaagcttaagattaaaatcaagtgtcatcctgcacaaggatgacacacaaatctgtgaagtgttgcatatttcttgcagtccccaaaaggacatttgactaattagctccaaggaaatggtgtgagtcaaagcaaaatgggtgacacccagtattgcacttgtgattttcatacacaaaatatttatgtaaggtgatctatgaaaagaggtgtggtaacacataggatcttgtgtgcaatatgttgttagtaggcctctcagaaatgagaacataccaacttgcatcttgtttgtggaacttacaaaaaataaaggtagagttttgtcttccacagcagctggaaatgaacatcgtgacttaagcatcattctaacaaagatttgttgattcaggtttaaggaggtagataaagagtagtagtagtccacgccagatgctgagatctgttagttttgtgcccttggtgtgattgatgaggtcagtaatagaggatgatcaggttatgcaatgtaatgaattaatatatttataaataaatttcattacaaattataaaatagcttagatgtcttgaattacaagccacaaagaatagaacatctaataaccaaaagtaggaattaataacagaaaactgcaacatttcaacattacaacctatgaagaaacacttttaagaaaaaataaatttattttttgtagagacagggtctccctgtgttgcccaggctggtcttgaacttctgggctcaagcgatcaccctgtctcagcatcctaaagtgcttgcatcacaggcatgagccactgcaccaggccaacacgttgggttttattgggaattttaaaatagtttcagcaataagattcaagaataaattatttcattgcttcaccatttctttgagcattttaaaaatgttatcttgttaaatctttgtaataacctagtgaaataagtctctaaaatcctcatttttagaagacattgaacctaagagaagcaacttgttcaagaaaaaatacctgttggtaactgcgctaggactttttatgagttagggacattttccattaagccaagctaactctagttaatttactgagtgatactgccctcaattcatgagtatttcatcttactttatttattatttaattagaagcttaataagttcatagagcttacaaacttaaagtctatgaaataagtaatgttctgatgttagctctgatattgtctgaaatactctaagaacttaataaatttggtaaatgttttctatatccgtgttaaaatagtaattttatttattacatttttatacatagcattcatcaacaacttttgaaacatatacgaaaattatctaaaaatcctcaaaataccaattcaggtaagacttcagatagcaaactactcttgatcgtgctaccataagattatggaagcgctgatcacaaaaaagcaattcaaaaagcaatgtgtaaatagcatgtgtttccatatatacgtatgtgggtgtgtgtatatatatgtatatatagctttaatttttttagtttattattcagaattagttaagaatttagttgtaggtagtttataatctcaaaaaaattatctgaaaaaatatttaattatggtccctaaaatcctatataatacctttgtgtatataagtaacacaatttttaagtttgtatattgtatgattcctcaagtgtcataacaactgagacttgttataaaatgtataaaccttggtgtgattgatgagctcagtaatgtgggatgatgaggttatccaatttaatgaattaatatatttataaatagatttgattacaaattaaaattagtttacatgccctgaattacaagccacaaagaattgaacatctaataacaaaaagtaggaattaataacagaaaactgtaacatttgaatattataacctgcgggggtctatcctgcagaccccggctgcatgacggatgagacacatacccagacagcgatattcagtgaaagagcagcaagggttccgagccgattacagacaccaaggttcttacaataaagtgagctggaggaaagaacctgttataaggaggaaaaaatatactcactatttattaagtggaagtcaattattatacatagaggtcttcattcttattgccttcatgttgagtagtctgataaggagaaggcagaggagagatttgtcttgctatcttgcagtggcaaaggaaaagaaaaatctattagtgggctcctagagtgaaaacccttattcaaggatcaactgtgtcacatagtgacttgtgtcactaaaaaagtaactatctttagaatttggaatttaataatacttttctggcaccataaacaaatgtcagcaagaattacaaaacttagccagggtgcatcagtaccaataggagaatatctttcaaagatacctactgagtgcagaagtcagaaaagcaattctttgttgagaagcgcaggttatgttacatagtcttgtaccaacaaggtctcactattatcaacttcattccgtctaagttgaaaccaaataagatatgtttactccattagagcaaggtatgttgttctatctactggataattagtgtgttaatagtaattttgttacagcaagatactctgtttctaatagccaaaatattatcattataaatattcagatagcttaactctaaactcaaaaaaattataaaaatattacaaaaacttttcacaacaatgaaaatgctactgatacctaaatgtgacacattgtacaatatgaactgtatgagcacatctttattatatatttaacaaaggacctctataagttaggtttggcaagttgcaggagacaaagatggaatacacagtttgggtctttaaggtgctcataatacagaagagctgtgcctattgaatttctgcatttttccaacagaatttccttaaaaagtttgttattcatttatccacttgtccacttaacaaataactgtcaggtatctttaaggtactaagcatcttccttgttattatcattgtcatttttatttgcttctttattaagatactaaacatttttcttgttattattatcttttttattatttattatttatttagtgtttactctgtgccggaaccccttttggagcttataattattacttattatgtcatgttgttaccatattcagcatgtgtcagaaattttatatccaaggtgaagaattaaagctttaaaatgtttggtagtgtccaggcacagtggctcactcctgtaatcctagcagtttgggaggccaaggcagatggattgcttgagctcaggagtttgagactagcctgactaacatggtgaaactcgtctctactaaatacgaaaaatcagccggttgatgtggcccgtgcctgtaatcacagctacttgggaggctgaggtaggagagttgcttgaggtaggagaatcgcttgaattgcattgagctgagatcgcgccactgcactctagcctgggtaacaaagcaagactccatcaaaaaaagaaaaagagaaaagagaaaagaaaagtttggtaatatttaaggaaagcatacagaataagtagaagtttgccaggtgaagaatcaggaggatgatatttaagcagaaagaaaatttaaccagattgtgtgtttggcagaaggaacatctacaggaacacctgacgaggctgcacccttggcaggaagaacacctgacacggctgaaagcttggtggaaaaaacacctgatgaggctgcacccttagtggagggaacatctgacaaaattcaatgtctggggaaagcaacatctggaaagtttgaacagtcagcagaagaatatgttaggccatgtgtctctataacagctattgaactctgcattgtacagtgaaagcagtcatagataatgtgtgagcaaataggcatgattgcactccaataaaactttgtataaaaaaccatttggtaagctgaatttggcctgtgatatatagtttcctggcccttcacacagaagatagatggagtgtaattacataaaaagttttaaagacaaagtaagcttttgtagtagttcatgctgtagtcttttttttttttgtcaccaatctgtggcctagtatcaatctattatgaaaatctgacccatccagggtaaaatgaatcaagttcagaagctcaatttacagatttaaacctgtaggtctttctttgccattattttattttgatttgtttaactgaattttttttaacttaaaaaataacaatagtatttggtagggtttctttttcatggtgaaagccatcagttaaggggccatgtctaagtaggaaatataaatataacataataataataataaaataataataaaaatggccttcagtttcatatattattggatatattttcctccagaattggcatttcagctgaagataatgtgtgcttcaaacttggaaataaataatgcatttaattatttgattaaagattgcacagtgaatttaatgaagacattatagtcttgtaatgtaatataaactcaatcttctactcacaaacaactttaagacagaatttaggaggaatgtcctttggaaaattatctttccttcccccacagatgaatcaaataaccaaacgtactgtttggaacatttcattttatctggaattaaccctctgttggcatgtcttcttcatcactgaaaatgtaagaaagcacagcctcatcatgaaaatgctgggtatccacgtctcacacaacttaaaaatcataatgagttgcaggttttattgtcaagaattaccctgtgcttcaaaaatgtgcttgctccttatgaagcaatataaaccttgtttttaatcttgcaaactgtatattctattggatatgtctattaaagatagagttatgagtgaacaataaatgtctttcctgagaaaggtgtattttctgttgcacttagacctgaaggtggtgtagaagatacttggccaaaactggggcaaagaggggttcctgtgaagaagcaacagtgagagtctggttatctacatataaaagaataaaactggacccttagactgtacacaaaaacaactcaaggtggattaaaggcctacgtgtaagacctgaaactataaaactcccagaagaaaacacagagaaaacaactccttgatatgggccttgacaatggttttttggctattggctatcacaccaaaagctcaggcaacaaaagcaaacaagtgagactgcatcaaactaaaaagcttctgcacagcaaacactcaacaaaatgaaaaggcagcctgcagaatgggagagaatatttacaaaccatatatcagataggggttgatatgtgaaatgaaaatctcacacaactcagtcaaaaaacaatccgactgataaatggccaaagtatctgaatagacattatttaaaaaagacatacgaagggcaacaagtatatgaaaaggtgttcaacatcattaatcagaaaaatgttaatcaaaacaactatatcacttcgcaactgttaggatggttattatataaaaaagagataagtgtgatgagggtgtggaaaaaggaaactcatgttcactgttggtgggaaagtaaactgatacagccattttgggaaatggtatgaaggttcctcaaaaatttaaaatggagctactgtatgactccacaatcctcctgctgggtatatacccaaaggaactgaaatcagtatatgaaagctatatctgtattcccatgtttattgcggtataaataaccaatagccaagctatgaaaacaattggataaagaaattatgatatatagttataacatattatatatcatattataatcttatatactctgtaataatataaatattatgaatatagtattcaatcttagaaaaattaaaattgccatttttgatgatatggatgaacctggatggcattatgctaagtgaaataaaccagacatggaaagaaaaatacttcatgatctcacttatatgtgctatctaaaaacaagccaagtatatagaaacagtagaatggtggccatcagggataaggattaagaggaaatgaaaaaaagcagatcaaagggtacaaactggcagtcatgtaggatgagtaagttgtacctaacgtatagtatgataccaatagttaataataatgtattctatactgaaaattttctaaaagcatattttcaggtgctcttgccaatcacataaaaatataactatgaaaggtgatggatatgttaattggcttgattatagtaataatttcatggcatatatgtatgccttaaatatgtacaataaataagtaaataaactaaaatgtaggttatcaaaacttaacaatttaaacattaaaactttcaaaacttgaaaaaatccaatgggagagatttacaattccttcaacactatcagagcagcaatgatggaagatatgtagaggaaggagacaacctgataaatgtagactcatcagcaaagcctgaggggacagtaattatatccatagtgttgacagccaaaccatcaaaaactttggtgtaaatatattatttttgcaacatatgaaacacaaacagaacagcaaatcttgattcaggcatctatcgtcctaattaactgcctctctgatcatgtgtgctctctgatcatgtgtgcatgtgtcaccttgatcgaaaccattttcaaaaataacgcaacaaaaataaactattgtaaattttaaaaatgaattatcacgtgaagtttatatttgaagttatttttcaagattatacttatcctgtggcctttaaattttttaaaaatttttcactctctagttgaatatttgctgtatgccaggaaaacttctggacactgaagatacttacagtcaacattacttcaaggcagttatggcatcctaattactgtttttagtaatataatatctgcttccaaatactcttagaaatgggcaacttgataaggtgattcctgaaagtctctgccatcttgattgtgttaactgtgtttatttaaagaggctaaaaatgagggtggtttttaatgcatggtaactattcattaaaaatgaaattatatatgaaaaatgaaattatatatgaaattataatgaaaaattcaagattactccatgccttctaacagtattatttctacttgggtactgttgacatcagaacaaattattgggataaataaatgtgtaagggccatacatacctactaaatctgagtgccatgaatttgtaattttatgttattttaattattgtagttattacagtatgtgtttataaccctttttgtgttaatatacagtaatcctagagacacctagaattattttaaaaggtgagtcagttgtcttcagttatagaaaattgacttatacacttttagtagcgaagtcaaaatatctgaactaagttcacttctgcacaaaggaaaactctgcgagtaactgaaattttctcaagattggcatatagacaatcctaaaaaatgtcctgggatatgaactatctcaaattggcagcatatactggcatgtgcctcatcctgctgacagtcatttcagtttgatacacttacaaaaaagagaaaaaagatagcttaataattccaagtttaaatagttatattggtatactccttaaaagaaaaatcagcacattatcttggagtaaaattttacttatgatttcttcacttttctcccatcaactcaacaggcagaaaataaaacatattaataaatacacatgcacacacacacacattgtggaaatcaaagacctgagtctatgtgtagcagtgtgttgataaactatctgtagagactggaggtcaaattaattgtatatatgaaaattatataactctagagactcaagaagacagataaaagttactacataagaaaatagagatttctctatttttccacaacagaaattaaagagtggaatagtgattttaaatacagcttctgttatcatttgagggaatagaaaagtgagggcaacagagatcggaatataggcactaatacttgaatgcctgttatgtgtagctattgtgctttgacaattttacataattgtcttatttaaccaacacaaaactttatgaaattgatgtttctaagactatttttctgtatgagaaaacccaggttctgacttgatgtcactcatgccatattgggtggctgaggcaggattcaaatgtaaacacggcagcaccacagtctatattttattaatcatacaaccactatatccacctaattataaagtctgtatgaaagcccagaaaaataggccagcattaaattgaaaaaagcattaaagagaaaactgttgatctaaaaacatttagttttacaacttttaatttaccaaaattgtggttgctactgtgactgttgtatagggaaaccatgcacaaattaattcatgacacattcatgttctttttgcatacgtctcttttaaaaaaaaagttatttaggtaaagtgctaaagagaagttatttcaccttgctgacattgtgtcttacagttttacccaaccaattttagtcattacttctttatcttaacaggattacttaattgcctagtcatggaatgaatgatttggctacttctatagatgcattaataaagccttatttgtataatagtcaagttaagatgaacatgcttgtgacctctcgcagaaataatgaagattctgcaatttaaagagcaataaaatgtaaagatgtaattaccaactcttcattatcttacggaatttcaagataaaatcactttatttcaatgtcaaaagacagagcattaaagtctttttcaaataccatttaattggatagattaagatactttaatatattaatttctttccttgttactgtatatttcacgataagaatgcagggatatatattagacttctgggaaattgaaactggtgtaacttaccagttaattctaaaatctattaatcatgtgctttgcttatctttcttccttggtaaaatatgaatgttcaaagatattttcatgttgtctaaagcatccgcatttcatatacaaatatatgaaatatataaaatattaacagaattataccaaatatatacaaaataaaaatatacaaaatattaatttagcagaaaaaaaaactgttgcatgaagataaggtacaggatggtactttatcttatggttttttgtgaaccatagtcagaaaaatcgggatcaaaaataataaaacaaaatatacccattgccttaaggaaataggtaaatgagataattatatttttaaaggaactatataaaagctttatgcaaaaatcacaaccatatttcttgttcctgcacatcccaatcaattcattagattgttttacacattctgcaaaaatattctaatgcaggcagagaatttgaaatgtaaaacattatcatactgtctcctatatttagagctcagctatgtctcttatatgttaaaatgctacttctgtttgacacacactcttacacctactgaggaaaaaaattgcttcatattaacaaagtgaattatctcttttgagtaacatgagtaacctggtcaatagttacttaccgtgtgttagttatgggctgaactgtgctcctctctcccaaaattcatatggtgaaattctaaagcctagtatttctgaaagtaaccatattgggatgttttaaataagaattcatttaaaatgaggccctcggggtgggtcctaatccaaaaaaatggtgtccatataaaataaaatttagaaaggggtaaaaatcagctacatgtatgcacagaagtacaactgtgtgaagatagagctgtgagaaggcaaccatctataagccaagaagagaggcctagaacagatccttccatcatggtcctcagaggagcactttgaccttggatttacagcctctagaactgtgggaaaataaatatcggttgtttaagccacccagtctgtgtgtgtgtgcatgtgtttaagtgccaccttagaaaactaatataattgacaaaagacataatggactttttaaagccagcacccaactacgttagcatcattttcagatgtttgttttagtttgtttattttattttatcaagtattataatgataattaaaaaaaaaaagttacatgaggtggttcacacttttaatcccagcactttgggaggcaaaggtgggaggatcacttgaggctggaagttcaagaccagccagagcaacataatgaaagccaatgtctacaaatttttttctttaataaaaaataaagctgggtgtttttataataatgtgttttattataaagcacacacctgtagttctagctacttgggagctgagttgggaggactgcttgagcccaggagatcaagactacagtgagccataattgcaccactgcactccaccctgggtgacagagtgagaccctgtctgtaaaaaataaataaataaataaaaatagataaaaacaatttcaaaacttaagactaaagaaactcagaaaactgtcaattacattttgctctgatttttctcttgtatatagtataatgaaatgttacatcaacttgccatttttaaaagtaaaaatcagatggatttagctgggcacaataccagttgtattgagaatttctaatgtcactcagatgaaagacttgaaggaaaggagatagatttagaaggaaaaggagacagacttagcaggagagatggttaatgagatcagtcattcaaataatctacctactagtaaagttagacaaacaaacaaacggcaacaacaacaacaaaaccctacccatcatctttagagaaaaatcatagtctcccacttgaaataacacattcgtctggaagcttaaataaaagaacacatattttcacacagcacaaaagaattatttttatatttggaacacgattgctacagaattatgaaaagaaaaaaatacagactgtagagaacaaaataagacaagcttccatcaagaaggaaacataaaatatactaacttgaaataacagatatacacaatatatggagttcaagtttttagtgttgactccagccgagatatatcggaggcaaagaaagatttgcaaaggattcatgaattatccaaagttaaacatgttatatctaaccaagccagacctagaacacattattggtcatattctttccattgactatgtctaattcctcttaaagttttttccctttacatataaatcctacacacattaccactttggtaagataaacagaacaaaacacttattttttctttcagcactttggatgtgctatcccattgtgttctgactaccattgtttctgatgaaaagtcaggtgttaatcataaagtcatttccttgtatggatgagttatttttcttttgctttcaagattaactcccttcacattttgtttaatccagaattattagaaactctaaatttgagactcaaagtcactcatcagatcaccacaaaatttcaaaacatacatacttagaatgtatattcttgtatatatcaatatataagaatatcaatatactactttaatgtcttcttttattaatacaaaatcattggaatatttgggaagggaatataagtcagagcaagagcatcctagattagtgattgctacatattaatcattcaatcattgtttttgtgtcaatgaaagaataaattacttccagtatttttgctgacatatttctttccctagtttcaagattcacagagaaatataccttaaataatatactttgattctcttgaaaacaattttctatctttctccccaatctttctcaatatttttaatacaatattttttgtttctatatccatcaaaaagtttcagtgtgatgagatagcataaaaatctatttagaggatcagtttggaagtcaagatgtgcaaaatgtttcttatctgctctgttctcttttcattatcttctccctgacccaaccccaaacattgtaaagaatgctaaaccctttataaagaattttaccagaatcgatattaaaattgagtgtgctatttattacttagaagtaattatcaaactttaacctgtaatctcatttatttacagtggagcatagtagttagaagaaacgtgactcaattagaggtcaattactccttagcaatgtatcagagttgggcaagttactcaacctctgctaataacaatctcttaatctgtaaaaataaatatatccatgaagtattcctaaggttaaatgaaataacttatattaaagtaaatcacttggtgtaattttgaatatacaatatgttctagcttgaattactactactaatgaaaaactgaagctcagatcaacaaaaaaatagtgccattctccaactttttctaggtagtttgctagaaataagagagcaaaatagattagggcccagtttctggatttaaggatcagaaatcatctgctgtgtttattatgaaccttttgtatcccttcagttcttcctgtaaatttttacaaagaacttactgaataaacagttaaaacacctcaaattaacaaaatcttctctactatatctccattatttcaaaaaagaaaagagaatcctttccccgttccttctttttgtcaggtttgtcaaatatcagatagttgtagatatgcagcattatttttgagggctctgttctgttccattggtctatatctctgttgtggtaccagtaccatgctgttttggttactgtagccttgtagtatagtttgaagtcaggtagcatgatgcctccagctttgttcatttggcttaggattgacttggcaatgtgggctcttttttggttccatatgaactttaaagtagttttttccaattctgtgaagagagtcattggtagcttgatggggatggcattgaatctataaattaccttgggcagtatggccattttcaccatattgattcttcctacccatgagcatggaatgttctttaatttgcttgtatcctcttttatttcattgagcagtggtttgtagttctccttgaagaggttcttcacatcccttgtaagttggattcctaggtattttattctctttgaagcaattgtgaatgggagttcactcatgatttggcactctgtttgtctgttattggtatataagagtgcttgtgatttttgcacattgattttgtatcctgagactttgctgaagttccttatcagcttaaggagatttagggctgagatgatggggttttctagatatacaatcatgtcatctgcaaacagggacaatttgacttcctcttttcctaattgaatgccctttattcccttttcctgtctgattgccctggccagaatttccaacactatgttgaataggagtggtgagagagggcatccttgtcttgtgccagttttcaaagggaatgcttccagtttttgtccattcagtatgatattggctatgagtttgtcatagatagctcttattattttgagatacgtcccatcaatacctaatttattgagagtttttagcatgaagcattgttgaagtttgtcaatggccttttctgcatctattgagataatcatgtggtttttgtcattggttctgtttatatactggattacgtttattgattttcgtatgttgaaccagccttgcatcccagggatgaagcccacttgatcatggaggataagtttttgatgtgttgctggattcggtttgccagtattttgttggggatttttgcatcaatgttcatcaaggatattggtctaaaattctctttttttttgttgtgtctctgccacgctttggtatcaggatgatgctggcctcataaaatgagttagggaggattccctctttttctattgattggaatagtttcagaaggaatggtaccagctcctccttgtacctctggtagaattcggctgtgaatccatctggtcctggactttttttggttggtaagctattaattattgcctcaatttcagagcctgttattggtctattcagagattcaacttcttcctggtttagtcttgggagagtgtatgtgtcgaggaatttatccatttcttctagattttctagtttatttgctgacaaaaagaagaaatggggaaaggattccctatttaataaatggtgctgggaaaactggctagccatatgtagaaagctgaaactggatcccttccttacaccttatacaaaaattaattcaagatggattaaagacttacatgttagacctaaaaccataaaaaccctagaagaaaacctaggcaataccattcaggacataggcatgggcaaggacttcatgtctaaaacaccaaaagcaatggcaacaaaagccaaaattggcaaatgggatctaattaaactaaagagcttctgcacagcaaaagaaactaccatcagagtgaacaggcaacctacagaatgggagaaaatttttgcaacctactcatctgacaaagggctaatatccagaatctacaatgaactcaaacaaatttacaagaaaaaaaaacccatcaaaaagtgggtgaaggatatgaacagacacttctcaaaagaagacatttatgcaaccaaaaagcacgtgaaaaaatgctcatcatcactggccatcagagaaatgcaaatcaaaaccacaatgagataccatctcacaccagttagaatggcaatcattaaaaagtcaggaaacaacaggtgctggagaggatgtggagaaataggaacacttttacactgttggtgggactgtaaactacttcaaccattgtggaagtcagtgtggcgattcctcagggatctagaactggaaataccatttaacccagccatcccattactgggtatatacccaaaggattataaatcatgctgctataaagacacatgcacacatatgtttattgtggcactattcacaatagcaaagatttggaaccaacccaaatgtccaccaatgatagactggattaagaaaatgtggcacatatacaccatggaatactatgcagccatacaaaatgatgaattcatgtcctttgtagggacatggatgaagctggaaaccatcattctcagcaagctatcgcaagcacaaaaaaaccaagcactgcatgttctcactcataggtgggaattgaacaatgagaacacatggacacaggaacgggaacatcacacactggggactattgtggggtgggtggaggggggagggatagcattaggagatatacctaatgctaaatgatgagttaatgggtgcagcacaccaacatggcacatgtatacatttgtaacaaacgtgcacgttgtgtacatgtaccctaaaacttaaagtacaataaaaaaaagaaacccccccaataaaaaacaagaaaataataataattttgtcaatgatagttaactatatgttagtcactaacactatggcagttaccttcaaattcatatttctaatatttccaatatcttcatatttatatatctaattcatatttgaacccagctctaatttaggaagttctcttttttcttttagaaattaaggcataaagtgtcacgtgacttgcacaagattgcaccactagtaaacttaaaaatatagtttacttgcctactgtctcaatgttttagtgatttattgatcatgcacaattatttttgaaaacagaaattcatttagcataccacatttcaagatccattggtagaagccactttattagcttaatcaacaaaaatgtctagaaaatttgagcttttattaactgataacatattagaagttacatatatatatatatacatatatatatatatatatatacatatatatatatataatgaaacaacccctataatctttataaaattatttgggagaggagggagcagatgaaacaaaaataagcttccagcacatccagccttaaacgttaagttaacttgctgtctgtcctgcttcctcataattgttcactaggtatggccccacaatcatttatatcctgtcacaagattatagttaaacttaactactcatagataacaacttgagcattgtaaaatgttaagttttctctttgaggtattctttcagatcctacataccagtgaaactactgacatcagctgctccgaagggctccaggagaagccgactcactaaagggcaaagtttctacatcctggtgatttaatcccccttaaccaaaccagtcagtgaccccaattttccagcccctggtcctctacaatcccttcaccccagccaagtactctctggaaagacagattcgagggtgctcgcatctcctcactcagctgccctgcaatcattaaactctttctctactgcaaactctgtttatcaatttatcagactgtgactgcacaacaggcatacaaacatgtgagtcctgtatcatttataaatatttaacttttatgtatatttaactgctataccataattgactagtttgtatgttaatattagtaggtaataataatatttatatttcctccataggtagcttctgggggcatttctgcctggtaaattttattctttaatgacaaatactaaagtaagtaactttaaaatattattgagaattttttttctattgatgggacactgaatttgtaggtggaaataaaaacctagctttttactaaacttaattttttatttaaacacaactcaaaatgtaaatataaaattaagaatttccaaaattaaacttagttttaggaactcacataagcaagtgtaatactgaagagcaaagaaactgtgctctataaaaaaaaattacaagtaattcttgaaatctaagggctaatttgtgaagtaaatttggaagctactttatgctgtagctccatcctagagaccgagagaactgcactaggaaaacctgttcaacctttttttaaccagaaattctttctttctccagaaatccttttcaggtaatgcctaatgatatctcattgaacatgtattagaaattgtagtttaatttttaattaaataattcagtgaaaatatattaattgtaaagataaattttaacacatatgggaatactagacttacggtggtcatcaacccaaaatgctacaaaattacatagaatggttagtttggcaaaaaataaatatcaccactagcaccaaaaacctaggtttcaaaaagaaataaaagaagcattccaaaatgttaaaaatttttcatttatctactttctaaatgttctttgaaacacttcttatgtcatcataattttgaagtttaaaagtaaagaaatagttattctagttaatatactaccttaaagttactctggctcacaaacagaacaaagcaaagcatgacttgacagcagtcgaattacgggaaattgaagctaaacgaaattggatacctcacctcatctaaactccttactttataagaaggaaaagcatcacaaaatgttgaggccatttaacttaaagtcatcaggtgagttagagataatttgagaccactgctttttttctctttgttactattctcttatgaagttttgcctgaaaacaggtctactaaaaatataagaatttgtaatgaagatgaacatatatcattgcctttctgcttaggattgttcaatattttcccattgataatatataaaatcctacctactttgacctcctctcccaccatttctttgctctctatctcctagaacttcattcttgactccaaagctgcaccctcctgcatcagtttcttttgtttgaaatcttcagctcttcataaatttcatccagcaaactcctatttatcctttaactccctattattttttcttacagtgccacattttccttcattagcacatatccaatttaaagttacatagtttgagtttttgcttgactttctgtttctgcactaaagcataagctccacaaaagcaagtatcatgtctgatttaacagggtatattctattcttttttttccacaaggcggtgcccggttcggtcccagacgcggccaccaaccgacgtaaagccggtgagccgctcggggaggagagaggatcggcgggcggcgggcggggaagggggcgcagacaggcaagggccggggaccgcgagggcaagggcacctgggagcccgcagaggggcggctgagggagaaacctcaggcatggccgggccaccaggaaaacacggccgcgggatcccaccgccacagacacgagggcggtcccgcggcgccccgcctgggacgccggaaggccctcggcacccaccaagacctgcctcacgagcccctggtcccgccaccggggccccgaagcgaccacagccacaaactcaacgccagggccacatcgctcgtgattctcgtccatcctccgacccggtcccgctccgggagaccggcgcgcccccaccgtgggacgctttcccagggccaggcggcccgaccacgtgccacgcaaacgccgtcgtccgcaccggtcgcgactcggcaagggagcgggcggagagctgactcgcggcggaggggggtcactcgccggacggaacgctgcgcgcagccatcgctcgctgtcagccgcgtcccaacccgctaggacgctgggccctgccggcgggatcctccccttactcggaaaggggaggcgccggccacagtaggcgacgagccgcgctcggccaccaccgcggtggccggcggaaccctcgctctccccccgtcaccccgtcgagggggaagctgaggagggttcctctgcaagcgagtcgctactgcagcgctaccataacggagagagagacagaggcggcaggccgggggatcccgtaccccaaggcacacctcttggatcgctagagaaggctttctcaccgaggatgggtcacactccccacccgccagccgcccctcgtggggcccgaggggcccgcagaggcgctcagggaggcctggggaagggagggggcctgtggtaccaggaaaaacctgcgtgcggcaaccttgagcgttcgcggtcagggcggggaccggcaggtgcgagcgtgagcgcaactccacaagcccccgcctcccacccccccccccaccccgtccacccgcctcttttcttcagaggcaaagcacctccgagtaaacccacacacgaccggtcggaggcagaacggtagcccctcggcggccggccggcgcacgcgtcaccagcccaagcccaccgcgatcgctcacagggcccgtgcgcacccgccagaggggagcaccggacgtgcgctcgccggaccaggcgggcgcccttccccgcgtgggaggggcgcgtctcgtctcactcaaccgcctcgaaccccacaccgacgagctccctcaggacccacgcgcggacaccgaggcgccgaccggaggagggggcgctgggggtgggaacgacacaccaccgctcggcctcgggaacctgagggacaacccggagcgctccaggagcaccgcaaaggcccagggggagccaacgctcgcgcaaactccccgggagggcagcacgacgggccggcgggacagcacccccaccgctgcggaggggggccgcccgcaagtcgacaaccacaggaggcgagagcgaggggtgcctgccgcgtcagaggaccccccgacccaccccgcgaggcagaaggcgggggcgggacagcgaggtcaggccgggttccgcaccccatgccttcccaacgcaccacccgcaggcgaggaagaggagagacaaggggcccccgcgggcgggacgagaagaagggtcccattcgccacgaatgtccgcccctcgcccgtcgcggctcggacacggccagggagagcatgacatcaccatattctattcttacaagagtgctgccacgtaagtgtcaatgaatgtttgtgaaataaatgagggactaaaggagtgatcgaacaaataaaaataagttatctgtgtgtattgtatgtgtgaataagattttgagtttggccaaggcagttaatcacatattaacaactctttagatacataaggtttatagcaatgaggtacaaaattggttcaacaccaaattctaagatgaaacaaggtttatgttcagaaatatagtgttactttttctaatatcatttgccctccaactatcagcatgacacatgcaaaccattgatacgtgttttttttttttgtattgaagattccacatgaagaaaaattattatatttccaataggaagtcctcttctaaatgacaacaaatctgagggtgaacacatttgttaaaaagagagagattaaaaagttaagatgctgtttgtacagtatataactgaacaaagttgtatctagcaatttgacaagaaaggtaaaacagaatattaacctcagcacacaagtttagctaatgatctggaacggggagttgtgagtagagaggaggacaaagatgaaagacaaccatttatcccaagtttctttccaaagatgaaaaataaaaaaccctcttagtaatgttttttaaattctaactactttcaagaacacatcaataagatatagagagataacaatcaagttggacattaacttaaaagtcagatgactttttaagcataagtaacttagaactgtaaagtaaaaaacactaaatgtcaatgactttaaagtggatactgaagtaaaaaaaaaaccttctattaaaaactagactatatgcagtaacttatgtagaaagcttagcataaatatttatacaaaattgccctaccatattttattaaaatattacattataaattaagagaaaataattttaaaaatgagttatattttaggcaatttttctcaaaatgagtttcataaattgatatggttattagcatagtaatttcaataataggaacaaagaaaccaaatgaaaacctaatgtgtgtatgtgtgtgtgtgtgtgttttgtgtgtgtgtgtgtgtgtgtatacaattacctggaattccaacttcaatatgtttaaaaatacttcagtgaaaaacattagatttcttttaaggtagtttgtaagatatttattaggtttatttgtaggccttgcacactaagttaagcaacactatcataaaataaattatttaataatgaaacagaaactcaaagcttcatattataattaaataaactctaaagtatctaataacttcaactgtatgcccttaaataacatcaggactacaatgtctatcaacttgcccacagaaaaagcaacaatgaaagaaagaaagagatatctattttgtcataaaagatcaacacactttgtccaactgttggtccaactgctataaagtgggccaatgctaatggcaaataaaggagctgccattcaacatgcattctagtagtgaatattaactgactactacgtgaaggcagtgttcattgaacaaataaaagaacccttgcctgcatgacgcttatattttggtcgctttacattttactggaggaaacgtgaagaatagaataccagcaatattagcaacaacattatcccactagaagggctccagtgattgatatttccagactcatctcagtgaccctatatgatctttatattccaaggaacatggcaatggattttaacatttccaaattaaaaggtaatggtaaagtaatgataatcaacataaaaaatgactccctggaaacgaaagcaactcatttcaaatggctttggaatgccattaggacagcacctttttatttgtaatgcataagtctcacaatccagagagcaggtcttgtgaattttgatgagaggtaaggcattacagaaagacacaaaagtcacgctccagatcccagcaatatagctagtaggacggacacagagtacatagttgtactactgatcacagtgacttagagattggaacctatagttctgtgagattaggcatcatttcaagataaaatttacatttttaataaatgcagactttggctcagctaaacaaggtaccttgggctatattctttcctgtagatagataaatttgacgtaattcacccttgtgcagtctaaacataccatgtgccaacagtgatgtaagtcactgaatatgtgagataaagtatgatgaattctattgacaaatacaggcaatggcttccatttaattgagaagaaaccacatacctagcacaagtcattttctgtgcattaacttttcataatacaactatatgaagttatagcctattttatatataagcatttccaaaggttaagaaagggcacagtgagagtgagaagcacagtctgggtcggtaggacaatctagttgtctatctgtgctttaaactcctataaacatatctcccataccacagcatctaactcagagtcacattcgaattgccagcaaatggaagcctcataaacccaaaaggtgaacggcagtgaagtgtatagagcacactttgagtgcacagagtatctttgcagacagtatcttttaagactttcacaatcacatcatgagattattcccataccaaaaagtaggaaatgaaagcctggaaacaagttatatcgacattaaactgctctcaaacccaagtgtacaaatgatttttcttgcaaagaaatttatatcctacacaaagttctatttcaaaatgaattctggaattcaattaaacactcatcttgaaaacaagagtttaagtggaaattcctcactggtattcaagcaaataaattaaataatgatattaaacctacatctaatctcttatcatacatattgaaagtttgctatatagctaccactaagttatacatttccagtgacacaaaccatgaaatgaatttctttctattggtactagcaaaaaacaaacaaactacatagacggcaaaaaggtcaatctactaatttatcttctaataactttccacccaggcgcattcatccctcttattagacggttgttctatgcttctttaattttttgacattctaattgcctcacctgaaccaaaaaaagaatgtggatctaggatcaataccttttgaaaagtcatttatttcattatattaatttttcatatatctgcattattgcatagaatacccgattggtcttatgctaagtttttcatgtaacattacctctgcaagatgttaataagtatccttccaaaaatgtttgaaaaatcttgggtaaaacatattaagtaagttcctgttttatagttttccaagagttttactatccttggccaatgatgaaattcaaagcagagatatagtacacaacttttgtaaaatttacctatttttcttgtaagactgtggctttgtttcattttgttttgttttgaacttcttttctgtgatgtgacataagactgtgttttgagttaggggtggggacatgcattaacagaggtttaggaactgctttgttaaagcaagtttgagggggaaatggggagactaatacaagattttcattgaagcagtgggagttgaaggggtaggtggtttttggagaaagaagagacccattcaccgcacaggcttctttatatttctgctctgtgtgatacatagtgaagatagagacattcacttcttctatttcccacccctggccgggggtaacacaaagggacctgatgaagacacagccttatacctgtatcaagtgtccttgagagtggtaggactggagaggcctgagaaataaaaacatacatgcattaaaaggaacaaataaagagaagaagaaaactcagacatggtaaattaactttgtacctttccttacaacctagcatatcagagggtacatgatttccttttgacctgcttcctttatgctgactgcatgaacagggaagggggttggggtacacgtgggtgataattgtatttattatatacctggtattaatacatctatagagacaattggaatgaccatactggggaaacagcaagggaagaactgaaaaagctaaaataaatacttggttctataaaaaatactacaaaaagatttctcatgtctgacaaattacattttagtctaatagcaataagtagaccgaagctaaggtgatttgataaatatcataaggtattttattgggaaattgatatctatatgtattgcttgtaaagctcagtaatctgttcttgaattgagaaattacggagacaacatcaaaagctgtcatttttgtttctatgttgttgttgttattgtttgtgaggtgagagcttctaaactttatgactgtttgaaagggacctatataggccttgcctgaatattaagtcatgtgaaatgataaacagctttctgatttattgggttaaagaaaaaattgagaaattgagcatcattaaaattaaagacttttgttattcaaactgtgcttagaatgaaaagaaaagccacaggttgggagaaaatcttttcaaaacacataccagataaattagtggtatttaaagtatacaaagaactcgaaaataagaaagaaaacaactcatttaaaaaataggccaaaggtctaaatacagctgtcaaatacagatattgaaaagttactagtcatatatcattagggaactgcaagtcacgacaacagtgagatattattacatgactattaaaatggccaatatccaaaagtctgataatatgaaatgctggcaaatgtgaggagaaacaggaacttttattcattgctggtgagaatgcagaatggtacagctactttgggagtcagtttggcagtttcttacaaaacttaaacatactattaccacacaacccagcaattacattccctggtatttacttaaaggatttgaaaacttacatgcacacaaaaaccttcttcccatgaatgttataggagacttattcatgaccactaaaatcgaaatgtccttcaggaagtgaatggaaaaataaactgtggtatatccaggcaatggaatattattctatcaagccacagaagacacacaggaacctttaaatgcatattgccgagtgaaagaagccagtctgaaagtctacataccgtgtgattcaactacatgaccttctggagaaagcaaaactatggagacagtaaagagatcagtggctatgagggatttggaggagatttgcgcagtctaaacataccatgtgccaacaatgatgtaaagcactgaatatgtgagacaaagtatgatgaattctattgacaaatacaggcaatggcttccatttaattgagaagaaaccatatacctagcacaagtctttttctgtgcattaacttttcataatacaactatatgaagttatagcctattttatatataaataaaagcatttccaaagattaagaaagggcacagtgagagtgagaagcacagtctgggtaggtaggacaatctagttgtctatctgtgctttaaactcctataaacatcacctcaatctactaatttatcttctagataaaatagtagaggaagtgatgaatggatggagcaaggaagaattttaggaaagtgaatccattattctgtgtgacactgtagtgaggattatttgtcattacacatttgacaaaacctacagaattcataaggagtaaactctaatataaactacagactttggtcagtaataatgtaccaatattgactcatcaactataacaaatgtaccacactattgcaagatgttaaaagtgagggaaattggggtagaggctgaggaagacatgtgaatgcttattcacttctttttgcaaacctaaaattgcttttaaaaagtcaattaataaaaattaaaacaaggcagggttttcatgcaatggaaaaaaacacacaattttagtaagtgactgataattatgcttatgccactttgctagattacatttcattaataaatatagtttcattctttatgttataaagcagaataaaatcagatatctagagaaattgattagagtaaaagcattttcacctctcaagtcagaatgagctctttagaatcagcccattttatagctaaatcaatcattgtttgatttaaaaaaaaattgagaaaaacattaacttcactttttccacgaaactcaatgtcatgacagcattgtgagtcacctcaatgtaggattaaaagctatttctggacccaatagacttactgtgctacattctgaaaatgtaagacattaaagtccagtctttgtttgatctgctgtcctttgcagttaccaaaaggtcaatttatcctgcttcttttttctctttttcatatatcttgcacttcagcttaatattagtattaagctaaatttcttattttattttgagtgatgaaggaaaacagagattgtttcaatacagttaatgagaataagcagcaaaaggtacttataaagtacacaagagagctatcagataaaaatttgttcaaaaaaagatttggaaatttttatcgcatgaatgttcaaatggaaaggaaaactttatggattttttttccaccacacatgagtagcagcactaaagtagtgaataatgccgcttcaattagtagttttcgtatatttctgatatcagaaatgtattgttagtaactagttttaaaagcagagcattttcgtgcatggtattccactgaattccaaagcccaaacttaacttaggctaatttctctctgctggcagcaccaataatttctcataaataacatttcatatatatatgtcattctgatgatgtaaaggagttcacatattatggacctacgagccaaattcaatcaatggcttgtttcatatggctgagagctaaaaattgttttggcatttttgaagtgtttaaagaaggagaaggaaggggagaagaagaatgagtagatgaaggagagacagagattacatatggccagcaaagcctataatatttactgtctagttcttcacataaagaagttttccaatctcgaacgaaacacacacatttttgttatgtcaaaaaaggactgcaataagtcttaacatcattgataggttcttgaaaactggtaataggtatatatatttatggtcacatgtgatgttttgatacacgaatacaggagggataaattggggatggttaattggtgcaaaaatacagtaagcgaaacccattttaccgtagattgacataaaaaagagttaagcttctacggcttttggtaacaaaaacatcaacaaacttgtaaataaagatcaaaacacttctaatattaaatgctgaaataaatttgagctattcatacatttaatattaataaaaactagtaaaatcattatttacctacttatttcagtttagggttgcagttgaccacagcctatcctgtcagctcaggatgcaatgtgggaaccagccctggacaggacgccatcgcattgccggtgcactcacacatacccacagttactcagactgggaccacacagacatgtcaatcgacctcacatgcacagccttgggaagtgagaggaaactggagcatccagagaatatccatgcagacatggggagaatacataagctctacacagacagtgaaccccaactggaatctatttgttttttctcatcaacattataatgaaatgacattgaatgaaacgtcgttattcgaagacctgttgtactcagttctaaacatttcagaattaagagatctacacacatcctcctctatataatggagtgggtctcttaaaatttcctggcaacatactcttagcctgcctagaaaacactttagaatagaactgcattataatacattttcatattctatttatatcttcatatttctccctctacttattaaggtataatcttgtatatgtagtccttcagttccttaacaaggtgaacatatgatctcatgatgtgtgttttaatttcttaactttgttgagatttgggaatgtgaggaggatggaaaggaaagaaaggaactcagcagctacaaaataaatctgacctttaattttttttattgaatttgtttcttgttttatttttccttcctttgcacaaatgagagcttctagttttacaaagggtaccaccaattttaggataaacatttgtatttgtgggataacacaagttcgagacacaatgatttagagattgcatatcaattttatcaaataaatgtgatgaaagtaagtgatatgcacagtcacacacacacacacgcacacacgcatatgtagtgataaaaccattgacacagattcccagatggcacttaatgtactttcagtcttaaattctttctcaacgacaagccatttgtttgcaaatgatttagcattcaaaaatgattcaacatgagaaaaaaatgcattgcacataaagttcagattacaaaagaattaaagtcatactaatataactataatttataatgaattcaaatagctttcagaagggtcatctgtggaatgtaaagagcaatctgaatttatttttctgtaactggtcacagcaatgttttctagactagtgagtgtgtgctcatacagcaccatgtgtgttcaacaacacacaaagttggatgacaaaatcactttagtgagaaggcagctatttccaggggcaccaatactaatgttagttttgagtttttggtttgcttttgtttgtttacaaggcaatgtaatgtttaaggaaaaaagaaaatcttaccagtccatgttgagtgaacatttcaatcaatgtaaagtcaaaagtcagctgccaccatgccatgcaaaccttacagtacatgacatattaaatcagtaacctcaaaagggacttcttagaagctatgagtaaaaggcatacacaaaatgcctctgagataaattcacaaatgaaatggaacatgatatctgtgtatatccaagaataatagtaattattcaaaaacaagaaaacttctaaattgaaagaatccctaaagtaaaagtagaccaaagaaaaagaaataaaggtgagaagtgagatgaggcagaaatagtgggcgacacggagacgtactgagaaaaaaagtagctaaagatagtgtgttattatttcagcaaaattaagtatatcaatactgagaaatatgacttgaaatagattcagtacctcaagcagaaacgtaaacaaataacatctggctttttcttttgataaccagtattttaaatacaaacatctaaaaatattatctttgtgtaagagttacacatttatcattccaatcctcagggtgcattgtttccaactaaacagtaatcatttcaataacaaaaatgtgctgtaaatactgtatggaaataaatttcctaacagatgttaaccagacatcagtcttcactggtaaggattagatttgaaggtgtttgcagataattaaaacttgtttttataacataacttagcagctaagtagtataatgaaaatgggatattcaaattataagatataaaatattaaagatagaagaacatgcttattttttcaatataaatattgttacagctcagagaaacagtatgaaatctcagggctcatgaaaggccacattctagagatagtgattgacaggtatggcaattcccctacagcgtggtgcctgttgtcatggagtagcatgtctcttacagggtactaccagaaggctcaaataggaagagccaatagtccatgtgagaaaccacggaaggctaaagatagaaggaaatatttgggccacgttgaagaacaagttcaccaggtgaattggcatgtggctagggtacaacttcccatacatacataaataatgaagcagtaaaaaaattaagttatcagagaagtattttattattattagagtcatgattagcattctcctcatcaggagagttttatgtttttttctatccctactctatactttttaaacacagtctccaattttgaaaataaaagtttcttatttttaattcaaatctcaattaaaataaaacaaaaaccaaaaatgtagaagttctttattttgaccatctatatatcatacacaacaaaaagactgataaaattccaccaaacacaacagctagatccttattcccgttaatgcttaagcccattccaataaggattttgtaccaaatctgcccttgccaaggctacctagggccttcattttattatttgcaatggaccattttaacttcacatccacgttggcttccttacatcctagatgcacatacagccagattttttcccatcagatgtgatttgatcttccaacttcggaatgccctgatgacttcctctttatctaaagatcactttaaaaagcctgaagtatttggctcttccctaaatctttggccagacgtaatggcatcctcccattggctttctttgtccaaactacattagccttatctcagatcttcaaacaagttatatttcctgcctaagatgtttgtatgggtgagtgaaaggtctgatgaagatagttcctttttgcccccaaaggttttattgatcatgctgacaatgaatttattgttattttaatcttttactgttatactcaggcttaaattctctaccctatacacttcagttgacataattttaatttccactatgatgcttctctcttttctatcaacactctctccccgcagggtttcatctagatcaggagtcagcaacatttttgacaaagagccagacagtaaatattggaggctttgtgttgccaagaggcaaatttatggaaatttccctgctgaaaaatttccctatattttacattttagacttataaatgatacacctacttataactcatgagccatacaaacacaggcagcagaccagatctggctcatggactataatagtttgccaacccctagcctagattcatgattttaggcatgatctataggctatgattatctaactcacatctctagccaagtcaacttgtcagtgcctacttgatgtctccacttggattctaactagcgtcttaatttaagatttaaaaaatgtaaaatcaatcacacatatgcacctacctacacctctgtcacttgcaaactgcctcatgtcatcaagacgttgccatatcactaaaagtgaccataatccgccatgtccctaaatccaaataccttgttataattcttgctcagtaaattcaatcatcttcaaatcaacttccaatctcaactgattttctccaactttattgctacaatcataatcccaaccaccagcatccttcaactggacaggtgctaaatgaacccccttccttcactactgtacccttccacaatagtacagcctcctaagagctaacctcatcatatcacatatccatcatacatttttcaatgtagttaatttatatttacactttgatataagatctaaatttggtccctgagggcactcatgtaatatctctccatgctcttccttcatggacattccagcgaaaccggccttcttttctttgtaagaaactatcaagctgtctttttaaattacagaatctttatatctgcccttctttctgctcagagcaccccagatcttcaaagtaccttcctatttgtcttcactcaactctcaaatgaaatattagctcctgagagagaaaaattctctgaaatacttatagccagatcagtgccttcctacttgccagttttactcaaccatgttatcacatgtaatcttaagacttcatagtaatgtaccttatagcccttcacaccattgctttgtttaggtatttgtatgtcttcgtcctctttccctcctcactacagtatagccaattgtgtctttgccatcttcactgctatatcccctagtgcctggtaggctttctataaatatccatttattgacttattgactacatgtatatgctaatcctttttactaatttttgttatactatgtatttctcttctccctctctttgcttccctctcttctcatgtccttgatgcttcctactcaatattaacatgtacatcactttgtgtcttcagcatttctcttttcattatattacgataggttaattttcctaagaaaacactattttgacaaaagcaaagcattaaagtaaagcagcataggatcaattttttcctggtagaaggaaacaccatctttccaagaagacaattccgccaggaaacaaaacaaacgaaaacatttctggtaagtcctagttcccaagacttgaagccagtatattttcccactttcaagtacccttgactgtagagataaaaggtatccacttagagatattaacccattaccactgcctaaatttgggttccagaaacacaacttaatatgacatcaatggatgtgataatcatttgaaagtggctttatcaaaatcatccaacagaacaagttactttctaattagcatcttcagttaaatacctaaatctgatgaataatgttatgcattatgctaaattgcattggctcactattctagaatgctttcaaattaattaataatgatatattcagtaatgagaaatataaaaagataaaaacctatttcaatcagtttaaattagaatttaacatttcttcaatacactattttgtagtcaattgcaagagtaataaagcaaaattattgagtctttaatagtgaccattcaaaattcataatgaattattagaaagaaaactaaggtccctaccaactttccacctcactccaaaccatagccaaggtcattacaacagcaagtaagactccacacaattcccacttcttcgcctctattctattacttctggaatcttctactactccaaattgtgtgttttgctccagactcagcagttctcactaccttgttcttccaattgccatcttctcggtgtggcctttcttgactatctagttagaaattaccctatcaaaattatctgatccccatccaggattacttttcaccatctaacttacgatacttcacatatttatgtggctcattgtctgttatctgtctccctaagttagaatgcaagcttcgtgatggcagagatttggtcaatttccttcactcaataattcctgacccaaagtaaaaacgtcataagtattttttgaatatacaaatatgtagtccgaattatcaaggagcttataaataaataaagacacaaaccagcattatagtgcagtttgagaaatatcaatagtgtggtataggaggaggtatgtaaactatgagaagcaacagttacataagaagcaattcagaaagacacacagtgtgggtgatatctgagttaaaggacagaaagtaagaagataaccagatggagaaaagagaggaagattttacaaacaagcatcagaaattaccataagaaaagcaagtacaaaataatcataagaaaaacaattgcatcccaattattatgacaaacataattaactatgaaaacccaaaaacagttcatgctttgataatgctaaagttgataagtagattaagatgtgatagaacaatctgtaaatcttggtgcttcctaacttttgagaaaacatttttaggcaaaatatgatgatttaaggaagaaaagttgctgatggatgaggcatgtcccttaaagacaaacactatgaacactgtgtacagcctttataatggaaaggtgccaggttttttttttaagtccttggaatctcaggtggcaactttgaaattcatgtgtaattcatgagttttttaaaagaaatgtaataagtaacacaagtgattctagagcttgtctttaggctgagggagatattggcattataagttgaagtgttagaaaggaacaataagaattaagaataagcagtaatttctgccaagatctgtggcacccagtctcacacataaggctttttggaatctcttggtttccaaggttcaggctctcatactttagtttgtacataaaggacttaagttattcttaaagcacagttttagcacttcacaccaggagatggttatgagaccgatcacaagataaagtgaaataggatgtgtgcctgcttgtagaaggaacctctttccttctgcgtttctattcctacttttctggcaggcaagtcctagaaaaaatttcatatacagattaatttttaaacaatttacattatgttttactattattagcttctagaataccttagcttaggctggccctggtggctcacacttgaaatcccagcactttgggagactgcagtgggcagatcacctgaagtcaggagtttgagactagcctagccaacatggtaaaacctagtctctactaaaaatccaaaaattagccgggtgtggcgatgcgtacctgtaatgccagctactcgggaggctgagggaggagaaccattgagcccgggaggtggaggctgcagtgagccaagattgtgtcactgcactccagcctgggcaacagagcaagactctgtctcaaaaaaacaaaaaacaaacaaacaaacaaaaaaagaatatcttagcttatatatttctcacatctgatcctaccactttacttcttttttcctgtttataccaattatttctattcctctttacatataggcagagagataaaactaaaatgtgtcatagacagtgacatctactaaatttacctattcttcatgttgaattccacaacagatttcaaatacaaccaaaatctccaaatgaaatcttaattctaaattgagtgcttgtagtcttcaaatatgttcaaatggaacatcaaagctcaataaaaatagttatattacttgggatggtatttaaaatattttttcctaaataaattcagcttcagaggagagaaaaccttcattaggagatgtatcttaaggaacaaattaagtcaaacaaatgtgaaagaaatcatactttattatgttgaatagtaagatttttttgttactattgtgaattaatgccatccaaatattgagtgatgtaattcaatttagtaaaagaaaaaagtctaaattatcaacttctttccttataaaaatgaaatatgctataacttgcattttttccatggcaatgaccctgatgatcagaaagagaggttaaaacataaaaacatttaaaatcatctaatctaaattataaaaaagaaatccctttcttcagaaaaaataattttttaaggaagcagtcaaaaacaaatctctactagtagatatacagcatacacatctcttactatctcccatgcagactgcataaaaaggcttgctgactacttttaagaaaacaacattcagatgtctggaaagtatctgaaatgcgtgattaatctacacagataattttctcaagaaaccaaattttgaagacaagtaattcaaaagtatattgtctttaaagttaatccactggtattcttaaactgctataatactttctctgtttaccttatagtgtgaacctctcaagctatgggaatgcacgtaatcttgaagaatagttgacttcttttgtaggaaaaagctgttagaaatgactgttaggatttcaaatgtttgggagcgtgtattcatgtgggttttatgtgttgaatatttgcatttataattttaagatgcttaaatccaaaactaaaatgacccatgtaacataattctgccataggataaattaacttcaattaaatttttccatacaaattattatctaccacaatgtaaaaatatttatatatcataaagatgtaagaaacactgacatctataatacagcagagttcaatttcactactacttagcttgatgatattttaaggtcatgtctcttggaatacacattcaatattcattgccaaatgtctgaactcacctctcttgaagccatattcaattatcaaatgaaaataatttaccaagcaacctcacaaaacacaaactctaggtagcattaaggtttttcaaagtgattattccttattagtagtgatcctaagatattaaaactcatagatcgcatgatctgagattttctagttgaaaagctgtagctataaacttttaattcaaagtcggataccaccttcagctgtcaaaagaattacacaatcacttaaatttctggaatgaaagagaaaatgaagggaataataaaagtaactttgaaatgcaccgggaaacaattgtaaggaaccgaatggaggcaaagacagagagagagagggctgtttatctaaccttcccttcttgagtaggttttctctgatatctctagaggaaaactggatgtgtaacaatgaaatacaaaatacaagatattgtcttcgtataattacttgtaatgattccaagatggcagaatttgagaacttgctaaatagcacaacaaagtggtctgcttttccaaaattttgccccttaacttaaatattatttcatggtgaagatcaataaaactgaaaattggaattgccagatattatcagattttattttttgaatgcttaatagctgacccaaaatctggtcataaaaatggaagttaaattaaattgtcctcaaaatttaagtttgctacatttgtaagtgccacttgcttcttcaaaatttcaaactttctcatatctagcagcaaatcaaaattaggaatttaagcatgtaaattcatcgtggaaaccaaatggattaaaattttctgtgtattcatgataatgtttaaaatttttgctacatttaaaccctaagttagttacaaaaactctaaaattatgcttgtttaaaaacttgggctaacttgcttttgaaaacatactgacatattcattccattcttcttataattatttttgtgtcactcccaaacagcacaccattgtatatgtccccaaaatggcacttctttgttaaagccattaagacagaaatatttttgagccagatgcaatggctcatgcctgtaatctcagtacttagggaggcctaggttagaggactgctcgaggataggagttcgtgacctgcctgggcaacatagcaagacccagtctttacaaatgaaatgaaaataaaatataaaataaactagctgggcatagtagtgcacacctgtggtcatagctatcaggaggctgagatgagaggaccatatgaacttaggagtttggggctgtgatgagctatgattgcaccactgcacttcagccagaactccgggttgctgaggaaataagttctcagttctgaatataaaaactgctcctgacactccccagaatcctgtaaatgagctgggttttctggtgcctctctatagtccctctttctcaggaaacatccccatggttttgcctgctgtgatattaattacacccatgcttattatatgtcagttcagttttatctagattctcccgaagtcagtgctgaacttagctgtttgaaaatgtatatattgtaatagttaccaaaaagacaaaatacagctagatatttatgctatttgttttatttccatcgtaggtatatttccttttaaaattcatatgtatctttttctaaggattgtctccattttcagatgttaaacactttctcatgcacaaaccacttaagcagcatagacacagagtccacgtcagggaatgttacattcagtataggcacctattatttggtaactcagaagtaggaaaatggatgtcctcaagcagatgcttttcttgacagatacaaaaaattgacaaggatcattgacttacttccaacccaccattcatcccttttctcttattttgaccctaagggtcccagagggataatggccctacattgttatttagaattcagatttcagactgcatttcttataccatttttataagtagtggttgcacacagttgagacaatactatgatattaatctacattcctcgttaaatcgacttttgtcttccatttttttagcttagctacaatttctcacacggtttctctaggaaggaacattgggatttcccaatgacttaaacatttagaacttagtctattcataaatatgaagagcttgtgtagaaagtataatttacttatactattatgcttaagaaattatgtgaaataatgtgaaaataatcttataacatttgtatgcttatttgctgcaagagtcatacttcattgatacttaatcataatcttggacattgcgggttccagtaaccaatatttaatgcaagactgtaaacttaatagagagaaaaccttatttataaatcttcatgtattcttttcttgacaataataatgagctatgagatttgtattttaaaagatacttagtaataaaaactttaatttttaaaacttttatttttaaattctgcttaattgcatgaaagttaaaaggtaatatttaatattaatgaggcttattgatctaaatgatgatatgcagcttgggttatacttgcaattataagatttgctcattataccaaagcaatctccttcactcaatctagctaccataaaggaagcaaaattccctgaatcataatatcaaagcattccattatgttttctattaagttgttttgttctttgaatcattgtctattttaatttatccttttagaaagaaaacaaattacttaacttgcatttcccactcgaagcttcactgtagctagacttggaattgatttcaggccattttttaataaatgatgatccccagtgaaggatagaatatttgagcaatcaatactgagtaaataaaagggtttgggtaaataagagagaagatacctatttttctcaaatattttaaatatctaataacctattcctcatctaaaacaagccacgattactggaaatgatggtcagaggaaggttttagcaaccctgtataatactacatgtcatgttggatcactgttacagagaaacagttgtcatgctgcattttagtaattctacacatcaccagagaaataaacaactcttatagacacagaaatccaacgtagctactgtctacatattcttgtttgagacctttggtgaaaaaactcctatgtgtattaaatatattttacattagttttatcacaaaaaagaaaaatgagaattctattaaatgctaatataaattctgaatggcatgaaagaaaaattaaaatcaaagctgatcttaattaacaaaatgtattatctgcttacatgtatatacaactattcatatacaaaggcacagatgcatttgtggttttgaaaaatatctatttcatttcaaaaattcactgaacaatattacatatggcaagaaaactgctctttttgaaggatcttttaaaaagtgttaaactttattagatacttcaaactagcaaagctcaacttcatcacaattatataataacactgcacactttcaattttatctggagaaatatacctatcccttgaaataaactctgtgaacttcctgctcacagatttcatttcaagccttgaaaatgcagaaaatcaatgccaaatatacttgccccaaaaggaaaagaaaatttcaggggtgtcaggatgttttatcacataaaatacagaattgcaatttgtatctgagcaagcaacacacctccaaaaataatataatacttatcacaaaatacattcacagatactagatttggcacaaaccactccatacagctattgatcaaatcagtattgaaagccttattacaaaatctatggcccttttctactctccaacagacatttcaggatgccacaaccttgcagttccactctatcattaatttcccctaaatacacttggcagaagaatgagaaacgtcacatttttcatttaatttctaaagaacatcacatcctttaagaataggttcttgaaattttaaaatgtaaaatttaaaaaccctaatgaaaagaaacaaacatccaaaaacttttcttcaaaatcacaacaactttatatgctacgtgttcttgtaaaataccacacacacaaactcacatgcatacccacccacccaaaacacacacacacacacacacacatatagcctcatacctcacacatacatatatatatatatatataatcaattccaacagagaaaagccaatttcagaaagatgccttcaattttgatgcatttactcacacctaattctatttcaatttaactggtgcagaggcattacaataccctgtaacaaaaacctggcagaagattacaacaaattgcttaaacgtcaaaccaaagactcacataatttcatcataaagtgaaatttccatctaactctcaaagaattagaacatccttgcacttgtcttggccttgtccattcccctgatgaccccaaaagaccacagtcatcatcaacagtcccagagcccacgtccacatccttctagtgacactttcatgtcttctggccatcgcgtcttaaactctgcatattcagtggggtggatgtgaaagtacaataaattacattcttagagaaatatattacgactcaaatcccatatctaatatgcattgtgcatttctgaattatcctgcttacaaggaggtacatttgaaaatcatgcttccctttaggattgtcatattgatgattaatatgaaagctcattcatctttaatctttattctaagcattcatctgaattacatttttaatatcattttccaaaacaggccttttaacctatgaatgttaaaaagtactcccaatatacatattggagttcagtcaagcaaaaaagttgtgtatggacactacttaagtataacttgatatttaggcaaattaatgaatttaacataccatgtaatctctacatatatacaaaaggacttttcaacacacttctgtaagtttagcataaatacccttgaaaatattctcaagttttaagtggtattctaattatgtcagtaattaactgaataaagagactcatcatgtacaaaagctaatcttgtttacttaaaattgagagtaaaattaattatagaagttacaaaacacttgtagttttgatttcagagatataacccacaggaactttcatatatacaaatattatatatgacaatgtatatttgaatgttcattttgaaactgctcttcatactgacacatgaaaatacttaaatgtccaccaaagcaaggttatttattcatacatttgaatgatatacactagatcaaaagaataaacttgagttgcatgtactaatatggataagtgtcaaaaatgaatagtgaagcaaaactagcaaactgaataatgataagttcaaaactatacctttcatatgtaaacatgtacaatagttaaaactatacattttatgttgcataaatatataatacagcataataacgcataagaatgataaacaccttcaagaccaaagttaggaaattacaagactacaatttaaatgattaacaagtggaattttaaatcagaggttactcctaaatcccaatttttctacagttgacaaaatacggagctcagaaaagtaaacttaatgatttccagaatgaatgctttattcaaaatgctacataattacaattctaataaacttgcaagggaatccagtcacccagaagttttctttctccctttctcctacatcacaaaaggggaagatttaattaacaactttgcattacttaacttcagactcatagtatcagagctaaagagaaatttaagaaacacctaactcaacctctccattttaaatgaacaaatgagttgaggttacagtgacatttctgagttcatatgtaaaaacagtattttgatgacaatgacagtttaagtactaataaacactccatgaaaagttactgtaatccaggttattttactgtgctaaatgccttacattctttacccaatttagttttcacagaaatcctatgaacaaaacactttcaaaatttaccacttcacagctaagaaaaacaaggcttagagaaatgctacacgatcccctagtcatgaggttagtaggtactattgtggagactgaggcaaaacaggacgatttcaatgcctaccctctaaacaagtaaacactaagcaggaatttagttctagatctcccaattgtagtccaataatcagccaaaaaatgattctgagaagaggggaaaaaagatgtcgtgtgtatggagcctcaagtatttgatcccaaatacatcttcaaattgaaaatcattagagcataaggcaatagaattattagtttgtttctaaaatcatcaacctttcccaagttgaacatacaagtatattttatcatacatatactatatgtatgtataacgtgtgtttatataagtattcctgtggtttatatatctggatttggaatcacaagtgttttgtgatatattaattttttttttaaagtctccctctgttgctctggctggagtgcagtggtgtgaccatagctcactgcagactccaactcctaggctcaagcgatacttttgcctcggcctctcaagtagctacgactacaggcacacaccaccatacccagctaattttttttatagagatggggtcccactatgttgcttgactggtctcaaactccttaggtcaagggatcctcccacctagacttccgaaagcaatgagattacaggtgtgagccaccttgtgttttttgatttcttcgattaattttacttataaatttaattacacaagattaattttgtgtacataatgaatctcttttgaggtttaaactactgatataattagagtaccacttaacatgagtgtaatctcagcattttgggaagccgaggcgggtggatcacctgaggtcaggcataagccaccgtgcccagcctatacacattcttttaactactacttgcagatatttgttccgttataattataggggaaccactttcacatagtatcaaaatatccagatccactcatcaaggtgtaaataatccttccgtaaattacttttgcaaatttatttttatgtaatatttccttaacttctccttacctacagccagtagtcattttaaaaggcagaatttttactattttatatggaactgaggcagtatttgaaaaaaatctcaaaacactcttcaggaaggactggcatctaaaacaccagttccaatacatattttagtaacattttaaaggacagatggttttcaaaatgttattataattaaaaaaatgtaaccttcctctctgaattgatgtgcatggaaaactaatatttcataaatgtcaagttactatgacgtattatgtaaatgctgcccgtgccattctataaatataaaaatcataaccttcgaactaactttggtattagtcaacagttgtgctgatgaaaagtaaaatcaattcatttaaaaaaaattttctgggggaggagccaagatggccgaataggaacagctccggtctacagctcccagcatgagcgatgaagaagacgggtgatttctgcatttccatctgaggtaccgggttcatctcactagggagtgccagacagtgggcgcaggtcagtgggtgcgcgcaccgtgtgtgagccgaagcagggcgaggcattgcctcacctgggaagtgcaaggggtcagggagttccctttctgagtctaagaaaggggtgacggacggtacctggaaaattgggtctctcccacccaaatactgcccttttccgacgggcttaaaaaacagcgcaccgcgagattatatcccgcacctgtctcggagggtcctacgcccacggagtctcgctgattgctagcacagcagtctgagatcaaactgcaaggtggcagcaaggctgggggaggggcgcccgccattgcccaggcttgattaggtaaacaaagcagccgggaaactccaactgggtggagcccaccacagctcaaggaggcctgcctgcctctgtaggctccacctctgggggagggacacagacaaacaaaaagacagcagtaacctctgcagacttaaatgtccctgtctgacatctttgaagagagcagtggttctcccagcacacagctggagatctgagaacgggcagactgcctcctcaagtgagtccctgacccctgacccccgagcagcctaactgggaggcaccccccagcaggggcacactgacacctcacacggcaggatattccaacagacctgcagctgagggtcctctctgttagaaggaaaactaacaaacagaaaggacatccacaccaaaaacccatctgtacatcaccatcatcaaagaccaaaagtagacaaaaaccacaaagatggggaaaaaacagaacagaaaaactggaaactctaaaaagcagagcgcctctcctcctccaaaggaacgcagttcctcaccagcaacggaacaaagttggatggagaaggactttgacgagctgagagaagaaggcttcagacgatcaaattactctgagctacgggaggacattcaaaccaaagacaaagaagttgaaaactttgaaaaaaatttagaagaatgtataactagaattaccaatacagagaagtgcttaaaggagctgatggagccgaaaaccaaggctcgagaactacgtgaagaatgcagaagcctcaggagccgatgcgatcaactggaagaaagggtatcagcgatggaagatgaaatgaatgaaatgaagagagaagggaagtctagagaaaaaagaataaaaagaaatgagcaaagcctccaagaaatatgggactatgtgaaaagaccaaatctacgtctgattggtgtacctgaaagcaatggggagaatggaaccaagttagaaaacactctgcaggatattatctaggagaacttccccaatctagcaaggcaagccaatgttcagattcaggaaatacagagaacgccacaaagatactccttgagaagagcaactccaagacacataattgtcagattcaccaaagttgaaattaaggaaaaaatgttaagggcagccagagagaaaggtcgggttaccctcaaagggaagcccatcagactaacagtggatctctcggcagaaaccctacaagccagaagagagtgggggccaatattcaacactcttaaagaaaagaattttcaacccagaatttcatatccagccaaactaagcttcataagtgaaggagaaataaaatcctttacaaacaagcaaatgctgagagattttgtcaccaccaggcctgccttacaagagctcctgaaggaagcaccaaacatggaaaggaacaatcggtaccagctgctgcaaaatcatgccaaaatgtaaagaccatcgagactaggaagaaactgcatcaactaacaagcaaaataacaagctaacatcataatgacaggatcaaattcacacataacaatattaactttaaatgtaaatggactaaatgctccaattaaaagacacagactggcaaattggataaagagtcaagacccatcagtgtgctgtattcaggaaacccatctcacgtgcagagacacatataggctcataataaaaggatggaggaagatctaccaagccaatggaaaacaaaaaaaggcagggttgcaatcctagtctctgataaaaaagactttaaaccaacaaaggtcaaaagagacaaagaaggccattacataatggtaaagggatcaattcaacaagaaaagctaactatcctaaatatatatgcacccaatacaggagcaccaagattcataaagcaagtcctgagtgacctacaaagagacttagactcccacacattaataatgggagactttaacaccccactgtcaacattagacagatcaatgagacagaaagtcaacaaggatacccaggaagtgaactcagctctgcaccaagcagacctaatagacatctacagaactctccacccaaaatcaacagaatatatatttttttcagcaccacaccacacctattccaaaattgacgacatactgggaagtaaagctctcctcagcaaatgtaaaagaacagaaattataacaaagtatctctcagaccacagtgcaatcaaactagagctcaggattaagaatctcactcaaaaccgctcaactacatggaaactgaacaacctgctcctgaatgactactgggtacataacgaaatgaaggcagaaataaaaatgttctttgaaaccaacgagaacaaagacacaacataccagaatctctgggacgcattcaaagcagtgtgtagagggaaatttatagcactaaatgcccacatgagaaagcaggaaagatccaaaattgacaccctaacatcacaactgaaagaactagaaaatcaagagcaaacacattcaaaagctagcagaaggcaagaaataactaaaatcagagcagaactgaaggaaatagagacacaaaaacccttcaaaaaattaacgaatccaggagctggttttttgaaaggatcaacaaaattgatagaccgctagcaagactaataaagaaaaaaagagagaagaatcaaatagatgcaataaaaaatgataaaggggatatcaccaccaaacccacagaaatacaaactaccatcagagaatactacaaacacctctatgcaaataaactagaaaatctagaagaaatggataaattcctggacacatacactctcccaagactaaaccaggaagaagttgaatctctgaatagaccaataacaggagctgaaattgtggcaataatcaatagcttaccaatcaaaaagagtccaggaccagatggattcacagctgaattctaccagaggtacaaggaggaactggtaccattccttctgaaactattccaatcaatagaaaaagagggaatcctccctaactcattttatgaggccagcatcattctgataccaaagcctggcagagacacaacaaaaaaagataattttagaccaatatccttgatgaacatagatgcaaaaatcctcaataaaatactggcaaaccgaatccagcagcacatcaaaaagcttatccaccatgatcaagtgggcttcatccctgggatgcaaggctggttcaatatacgcaaatcaataaatgtaatccagcacataaacagagccaaagacaaaaaccacatgattatctcaatagatgcagaaaaagcctttgacaaaattcaacaacccttcatgctaaaaactctcaataaatttggtattgatgggacgtatttcaaaataataagagctatctatgacaaacccacagccaatatcatactgaatggagaaaaactggaagcattccctttgaaaactggcacaagacagggatgccctctctcaccactcctattcaagatagtgttggaagttctggccagggcaattaggcaggagaaggaaataaagggtattcagttaggaaaagaggaagtcaaattgtccctgtttgcagacgacatgattgtatatctagaaaaccccattgtctcagcccaaaatctccttcagctgataagcaacttcagcaaagtctcaggatacaaaatccatgtacaaaaatcacaagcgttcttatacaccaacaacagacaaacagagagccaaatcatgagtgaactcccattcacaattgcttcaaagaaaataaaatacctaggaatccaacttacaagggacgtgaaggacctcttcaaggagaactacaaaccactgctcaaggaaataaaagaggatacaaacaagtggaagaacattccatgctcatgggtaggaagaatcaatatcgtgaaaatggccatactgcccaaggtaatttacagactcaatgccatccccatcaagctaccaatgactttcttcacagaattggaaaaaactactttaaagttcatatggaaccaaaaaagagcccacatcaccaagtcaatcctaagccaaaagaacaaagctggaggcatcacactacctgacttcaaactatactacaaggctacagtaaccaaaacagcatggtactggtaccaaaacagagatatagatcaatggaacagaccagagccctcagaaataacgccacatatctacaactatctgatctttgacaaacctgagaaaaacaagcaatggggaaaggattccctatttaataaatggtgctgggaaaactggctagccatatgtagaaagttgaaactggatcccttccttacaccttatacaaaaatcaattcaagatggattaaagacttaaacgttagacctaaaaccataaaaaccctagaagaaaacctaggcattaccattcaggacataggcatgggcaaggacttcatgtctaaaacaccaaaagcaatggcaacaaaagacaaaattgacaaatgggatctaattaaactaaagagcttctgctcagcaaaagaaactaccatcagagtgaacaggcaacctacaacatgggagaaaatttttgcaacctactcatctgacaaagggctaacatccagaatctacaatgaactcaaacaaatttacaagaaaaaaacaaacaaccccatcaaaaagtgggcgaaggacatgaacagacacttctcaaaagaagacatttatgcagccaaaaaacacatgaaaaaatgctcatcatcactggccatcagagaaatgcaaatcaaaaccacaatgagataccatctcacaccagttagaatggcaatcattaaaaagtcaggaaacaacaggtgctggagaggatgtggagaaataggaacacttttacactgttggtgggactgtaaactagttcaaccactgtggaagtcagtgtggcgactcctcagggatctagaactggaaataccatttgacccagccatcccattactgggtatatacccaaaagactataaatcatgctgctataaagacacatgcacccgtatgtttattgcggcattattcacaatagcaaagacttggaaccaacccaaatgtccaacaatgatagactggattaagaaaatgtggcacatatacaccatggaatactatgcagccataaaaaatgatgagttcatgtcctttgtagggacatggatgaaattggaaatcatcattctcagtaaactattgcaagaacaaaaaaccaaacaccgcatattctcactcgtaggtgggaactgaaaaatgagatcacgtggacacaagaaggggaatatcacactctggggactgttgtggggttgtggtaggggggagggatagcatcgggagatatacctaatgctagatgacgaattagtgggtgcagcgcactagcatggcacatgtatacatatgtaactaacctgcacaatgtgcacatgtaccctaaaacttaaaagtataataataaaaaaaaacaaaaaacaaaaaaaagaaaaaaaaattttccatgaaacaaaaaacaagtaacttgtaagaagcatgctagatgaaccaaaaaataaagtaagattaaccataaagacatgccatggacttctctaatctttttttggaacacccttttcatgcgtatgagaataaaaattaaatattaaataccttctttatgtatgtacttttacttgtacctattgctctttaaagattaaaataactcctaaagcctggatagttgagcccattgtgctcttcggcccataaaatagattggatatgcagtgaaagagagataaaacttaagctttcagattggttatgacgatggaaacacaattccattcaatagtgttcatcttggtctttcaaatgtttaaggtcacaaggcaaaagagaacagactttaagaatgtccgtgtattacttctcgtcttacccaatagctacattagtttaattaggcaagtgttttggagtaaacagcactgtgaaatgtgtcgtggagtccagaggctccacaacctacctccagatagttgttctgtccgatggagcctagaataataccaccccagtttcagagatgcattacatctacaggtaccaactaggaagggtagtcttgaattaaatggctttagaacacgttataagagcaaattgaagcttccaggtattagaaccacttcaatcacagagcatctctgggttctatctgtggccagcatcaggtatctgtctgccctccccgaatggttcctctcatcatgtggatcttctagatggttttattcttccccagccagccaacctgaccaacaagcctgggtatattatgtatgtataaagttggttcttaaataaagtccatttctatatctaggtaagtaatgtcttcagactggcaatttcattgttatctagaaagagtgactctagttagcttctagtgtcagtttttctagcagcttctttaaaaaaaatcctctctggaacaaagcttccttgcaagcattgctgttggcaatattcctctttactgaaatgcttatccggtgaaacttgggctgtgccagtgagcctgcaggttgacagtccttttgttcaacttctccattataagcaacctctctgatcacccttttaaaactaaagatcaaagaatcaaatgaggtcaggaagtgaccagagctcacaggtcatcaattcctcttcttagcatattatagcacacagtctaagccagaaaaacacagtagagcccattacagctctcgagttccagttattaacattgatttttttcaatggaaaattttcattagaagccctcacatgactcacattcagtaataactcagattaagatatatactggagcctttgtccttagactaggtgccactgagtcaccattaaaaggagtctttttgaccttagtaaattctcacaggtagggcttatctcagtctaaactgtacctggcctttaatagtgatgtccaaagtcctgtgtaattcaaattaacattgtaatgtatataagttgtatatgtagatataatacatgcatgtatttacaattatttattttattttattttttaataagataaaacttagacgttaaaatatgactctaggccattgtgctttagaatgaagagcacagacatgggttggaaatgtaaattttgaccccatgtaatttctgtgacaaattaattaatgtcttcaaggttcaggctctatgtatgagacaaatgaaaacagctctaagattcctgaaaactctaaagtattaaaattccactctgccattagttcagataaatcatttgccaatttcccccacaagaaccaggcatctttaaatggtaacataacatgcacttctctctcccaaagtgtagtgcataaacgttctgcttctgaataacacaggatgcctggtaagatgtgctgtcaggggtattagtaaggaaatgttgtatcaaaacttctgcagatgtggccctgaaatacacattgtaataaatcctccaggcctctcaagttaggaataacttctttataaaattgtacttacttaaaattatagataaacagatttcacagtaacccaatttttctgatctgaatgaaataaggctctatattcagactgacctttcagtgaaaaacaacttaaaacagtgacaaaccatctatgtctaagtttaaatgaatgtaactaagagacctgaaaactcaggtttagtagtcatcttccaatagtttgagagcccacaggagccatagagccctcaagtctctccagagaagcagggtggtttttcgtcctaaacaccatgaaattcttgaagtgagtaaaagcattcctgcttacactgatattctctcaagtgaactcaaagttaagccatctccagccagaccagataccctggcccatatctcattcattaatataggttgagaaacctttgtttcttggaaactacatgaagtgaatagactgtggactccactggacctagtggtctatatttaatcaattcccttaacaaatatgtatcagatgctatcttagttacggagctgcagtggtgagtaagaaagccatagtcctgtactcctagggttttaattctgaagacgaagacaggtacagaaacccaactaagcaaagagaggagattattacaaaatgtgttcacatgcaaagtcaagcaagggactgaatacacaacaagggtgttggggggaacatgagacagatataatcttaattcagattatataagattcatacatataatttttatatatagatatatgaatttgggctgggcgtggtggctcatgcctgtaatcccagcactttgggaggccaaggcggatggatcacttgagtccaggagtttgagaccagtatgatcaacatggcaaaaccacatctctactaaaaataaaaaagttagccaggtgtagtggtgcgtgcttgtagtcccagctactcaggaggctgaggaaggagaactgcttgaaccccggaggcagaggttgcagtgagccaagattgtgccactgcactccagcctgggtgacagagcgagaccctgtctcaaaagaaaaagaaaaaaagaaatactaatttggattatacagattctaactatttctttcaagtgagaatatttaagctaagacctgagaataaaaagagttagcttttcatacaatacagaaaggtctgtcttttaggaaaaaacccacagtgttcaaggaccctaatgtatgagcaagatcttggcatgtggaagaaatctgtgaattggatgaaatgaaaaaactgaaaagtaggaatctggatgaagtacaaaaagactaatgtgagatgtggctgaaagagaagggtatgtgaaactgtacaggtcttcattagtgatgatgaggaacataggtcttagtccaagtacaccagaaaagtgggagagttggaaactgaaagacatgttaagagatcactttggtgtctatgtagctaacagagtgtaggaaattaagaattaaagttggttgactaaggatgagcctaagaaaatagagtaggtaagaaaataagtggatctggctaggctggggacattggaaatcaaaataagtggaggaaattacagatatatttggaaccaaaatattttttaaatgaatgttgaattggatattgtcagaatattgaggaagagccaaaaatgacttataagcatctagcatggctggcagtgccacttactgacatgtgggaaaccaggacatgttacctctgaattattcgagtgctattgtcatgtaaatcatcaactcccagaataaaagtctgggccaaactctaaaagtggaaattcttagctgtttagtagtgtttagagcttagaaagagtatgtgtgtagagagaaaagaagagcaattaggacagaacccttagaaacatcaatatttaaaatttgggaagagaaatagaaacaaataaatcttctattaatggtgggaaaatgaagctcagggtagctgcaagggaatgctaaaaatgaactatggcatttgaggaggaaaatgtggaaactgaaagcaagagagtacaaatgaactacggcatttgaggagcaaaacgtggaaactgaaagcaagagagtaccgatggattgtgagagagcagcagcagctgtgtcctaaggagagtctcaataaaaatgaaggattgtagaaatgaggatatccgagccaatgagcttgcaaggagtgatgtccaggaggcagaatatttgcatctagatcctggtggtacatatccttatagaaaatgtttcagatttgatgacaataaagtggaggaaaggaaaaaagtaatggaaataaagatgtcaaaaaatggggaatagaggtttgtaatggtcctttcatgtgaatgttgagccactaaaatgatggttgaacttgcctgaagatgatattgagcaaaagatctaaagccttaaagtggccactggcaagaaatcaagaagcaacccaggactgataaactttgttaaaggaaatggaaacaacctatctgtgaggcttaattcttgatggcctggccaaggtatagcatctggataagagttcactgactcaaactaaattttgtgaaggtgaagtacttgttaaaatgaaagatctatttacagagaaataagtaggcataatgtctgcactatggataggtgtatacttgctttttgcaaaaagtttgtatctgtgaaatgctggtttgccctggacagagctaacttaaatagaggccggccacggtggcttgtgcctgtaatcccaggactttgggaggtcaaggcaggtggatcacgaggtcaggagatcgaggccatgctgtttaacacagtgaaaccccgtctctactaaaaatgcaaaaaattagccaggcgtggtagcaggcgcctgtagtcccagctacttgggaggctgaggcaggagaatgacgtgaacccgggaggcggagcttgcagtgagctgagattgggccactgcactccagcctgagagacacagcgagacccgtctcaaaaataaataaataaataaataagtaaataaataaataaatatatataaaaaaccaaaggattataaatcatgcttctataaagacatatgcacatgtatgtttattgtggcactattcacaatagcaaagactgggaaccaacccaaatgtccatcaataatagaatggattaagaaaatgtggcacatatacaccatggaatactatgcagccataaaaaaggatgagttcatatcctttgtggggacatgtatgaagctagaaaccatcattctcagcaaactatcacaaggacaaaaaaaccaaacaccgcatgttctcactcataggtgggaaatgaacaacgagaacacatggacacaggaagggcaacatcacacactggggcctgttgtgggatatggggagaggggagggatagcattagcagatatacctaatgtaaatgatgagttactgggtgcagcacaccaacatggcacatgtatacatatgtaacaaacctgcacgttgtgcgcatgtaccctagaacttaaagtatatttttaaaaaagagaaaactattaaagaaagactataatacacaggaaacacagacacacatacacctgtgtgtctatatcttcagttatcacactttttctatacagactccaaacaagacaaacatgttacattttattttaggagaaactataagtagaaagaggagaatttgttaaatcaatatagaatgttccttgtttagcataattctaagtgtttctcattagaggtttgagtaatcaatctgtatcatatgtggccatgctggcatttgggaaattccacaagaaactttttaaatatgaatttggaaaagggaaaaggattttaaaagtgtctttttttgttctgcattctgtgtggaacatatattttgtgctacctgctcgtgttagcctgtgattgcctgtgactatgtggaagatatactttatgtgactatgtgagcaatagtcttaaagttaagaaatctaaaaatcggttggcttagttgctaattaggtaaattaccttgtaatagttacttaacctctcaaagattaattatcttaagtggtacattgaaggttccattcatattgattttagtagacttatcctgctaaaaagtaaatttaacaacagaaattattctagacctcattatttcaggacaccccacaccagcgtttattcctaacttcaagaaatgcagagacatttaaaaattggattttcttccaattcaacagaatataactgaactaaatagatttatgtataattcattatttcaacctttaaggctatatccaagcagtttgttttcaccataaagttatagctgtctaggccaataattaaagaggaccttgatagagaatgacaagagaggatgattgccctattgtctatcttccagctgctttcaatgccctgaagttttattcacacccaaatattagaatcctgagagcgcgtactcaaatgataaatcatgctaatttctcaataaaagtgttacagaatagtaatgcctaggttttcttctagggtttttatggttttaggtctaacgtttaccattcaggacataggcgtgggcaaggacttcatgtccaaaacaccaaaaccaatggcaacaaaagccaaaattgacaaatgggatctaattaaactaaagagcttctgcacagcaaaagaaactaccatcagagtgaacaggcaacctacaacatgggagaaaattttcgcaacctactcatctgacaaagggctaacatccagaatctacaatgaactcaaacaaatttacaagaaaaaaacaaacaaccccatcaaaaagtgggcgaaggacatgaacagacacttctcaaaagaagacatttatgcagccaaaaaacacatgaaaaaatgctcatcatcactggccatcagagaaatgcaaatcaaaaccactatgagataccatctcacaccagttagaatggcaatcattaaaaagtcaggaaacaacaggtgctggagaggatgtggagaaataggaacacttttacactgttggtgggactgtaaactagttcaaccattgtggaagtcagtgtggcgattcctcagggatctagaactagaaataccatttgacccagccatcccattactgggtatatactcaaaggactataaatcatgctgctataaagacacatgcacccgtatgtttattgcggcattattcacaatagcaaagacttggaaccaacccaaatgtccaacaatgatagactggattaagaaaatgtggcacatatacaccatggaatactatgcagccataaaaaatgatgagttcatgtcctttgtagggacatggatgaaactggaaatcatcattctcagtaaactattgcaagaacaaaaaaccaaacaccgcatattctcactcataggtgggaattgaacaatgagatcacatggacacaggaaggggaacatcacactctggggactgttgtggggtcgggggagaggggagggatagcatcgggagatatacctaatgctagatgacgagttagtgggtgcagtgcaccagcatgcacatgtatacatatgtaactaacctgcacaatgtgcacatgtaccctaaaacttaaagtacaataaaaaaaatagatacgacttctaagacatctcaattctctgtgaattttgatactatagggaaccaggacatgacactaattgaatagattcctcagagacctacaagctgtcaactgcataaagatttctttatgtaatgcaatgttttggttcattgtacacaacatcaaaacactaagatcagagagaatgcaaaagatgttttaactgatacttaagaacagaatacatttgacccctcaaagcgtcccaggaagagtaattattctaaacacttttctatattcctcagaaaacagtagaatcccatagttaactatcatttaaaatagtggcttaataattatctttgatgcctaggtgaacatttatttttcttgtccctattattatacaataaaagtccaaaaatgcataaagtcgcctacctacaatgacaaaaaaaaattggcagtgtgagcctggggatggcctggaagcaagtcatgagcactaacgcatttgcatgcatttgactgtctagtaaagcagaccaattatacagctcccaaaaggcagcttagtgatggaaaattctttcagtagctttttagtttatttgattgattgtgtatgacccagtgatagcagtttgaatttgattgtagatagaaaagaaaaagaaagcaaactgatctatattacttaaaagagcaagtatacagaaaactaggcatgcaattattcattccatactggtgaatattggtttttgagaaattaaaaaatacatttctttgtatttccaggtattgattttaatcttattaaatgaaataaccacgtgtcaacctgggggaaagactgagtgaagaccatcatgatcatctcaaaacacaaaggaacttgcatccagaatggcttaactttgaaaataggtacctgagcaaagaaaagggttgattcatttgattgttatagatttagaagaaagctatggatttagaagaaaactcacttgactacctaaatagctttatgtcatttccagctctcatatctctctactttggaagtagattttgaaacccagattctattttgaggcttctcttgccaaaggaattgtcatgactcttctctttacctcacaggacccaactttaacaccattctaatcttttctaattcaacttcctatgctttgttttcatcgaggcagttaatcaaataataaccataatcatagtaatagtaataattatgactataagttgtatttaaatactaagtgctttgcctgtatacactcattttatcctcacaactataggaggtagcaactagtgtcatactgaggcatagaaaggtgaagtaagtcacccaattttaagtggcagaggaaattttcatgcccatatggtgtggcttaaagcctgcacacttgaacactataccagatagcatggactactaggcaggattaaagagaagtggcataattgtatcacaattggtatactaaaggaaaatttggtaaatattttttctaagaggaatactttgattttgtatagcagaacaatgtaagtgaagtaaatattgtttaggaaggattttaagttcatattgatttaatctgcctcactggggatgtgtgccttaaaaaccctcttactcctttttcatcttagagagaggtttccttcccttttttgtgagacagtgtctcactttgtcagtcaggctgagtgcagtggcagtcatagatcactgtagcctctaccttctgagctcgagtgagcctcctgtctcagcctcctgagtagccaccagcatagctggggctacaggggtgcaccaccacatcttattttttggtagagatgggatttcagcattttgcccagcctggtcacttggagagaggtttctagtcacatattcagtatgttattttcctttagatcttgcttattcaatttttaatcaaaggcatgaataaagatatagactgcaaacatacgttggcttatttaatatcagactcaaaaataatatgcctaagtacataaaaccaaatgtagtagaaacaagtatcaagttttatctttagttttatgaaatgtattttttaagatgtttaaacttgaaacacatgtcacagtgttatgtaagttttggttcatttgtctcgctctgcttctgtataataggtataagatgatctttcagaattcttagcaactgtatagtacttatctcctagaacttgttcaataataattgctagatggattcatggactaaagaattaatagatatagattgaaaactaaagtattttattttacaaagatcagaattaatttactaaaatctaaatttctgctagtaatattaaatacacgtggataaactacaagaatgataaaaatattgcatcgtaagagtcattaaaaacttgatatattgttagacaacaacagtatattatgattgtttttcaggcctctcattccaagacagattttaatacaatgcaaagtatcaaaaataactttaaaatatgatgaatgctgtgaaattcatgaaacatgaacaaaaccttaggatattccatgtttatttcagagaagatataagaaattgatttttacatacttaaaggctttccaaagcaagattagaaatgttgagtttttccagagacttacatatttcagaaaagccaatttcatctcaaactctgaaagtcattttataaagtacattggtaatcattgcatctgctacttcacaaggttttgtgctctttgaaaggtgtcaagcagatcacctttcaaaaatgttccagttttctactgaatgaactgaaagccctcccaattccatattcaaaagcttgcgcaatttcatgatttgaaaaattatataaagtcctaatgaattcattctgcagccaaacccccaggagtcctgtcctcaggacctccctgagccgacttccaccgagggagggggagcttcaggaggcggagcttcaggatgcctgctgtgttctggggacatccgtgtcatatccggttttcagcttcttcttgaagattgtttcgtatcgtggcttcatttctcagagaagagccgcgaggagatagaaccatctcctttcacattggtctcctcccctcctggaaaacaatgagctccttttacctttttttttttttttttttggttcgagtgtggtcatcttgattctacaaaagaggtagctcaggatcgtgatgaaatttcggtttctttgagaccgaagcttctcacattgtcgaggtcttcagaaagccaaagtggaaccgccgcggaaatgattgacaaccgcccacatgacccaggcagagacgcagacagaggcccactaaagacacgctgacatgcaagagaccgctttgtagcgcactgggcacataaacacacacgctcacgggcacacacacacagagagacagagaaagtgagagaaacagagagtgagtgacagagagaagagagaatgggagacacacgcacccagacatacagcagtggcagagacacacaacccccaggcaatcactgaggctgcgggtttctgctgtttgtgagaatgaccctcgggtgagagagtagtccttgggcacacgggcagacctgtcctcgagatcacggggggcacgactttggggggactcacccgaacaccgtacgggcaggcctgaggctgggatgccgcactgctttccctggactccgtctgctgtttctgcatcctggtaggccctccgtgtagcatagtgtcccgaatctgttttgtcgaccccctggattagtcagactggagcctcgacaccgacgcaccgccacggagggctcctgctttgtcaaggctcagggaatcgtcctcagccaaccgttggagtcaccgtcacgggagaatgggctcgtgcctcccgcatgcgcattgcccaggcggactcctgctttgctcttcgaactccggctgtggccgctttaaacaggttcagcaacacgtggcgggggttctgtggcagtcgcagtggcggctggagtggggatgtagtaaggggcgttatgggagtgggggcttcgggtcctccagggccggacccccgggagacctgttctcagaacctccttgagccgacttctaccggtgcagggggaccccgcttcaaggcgccagctcgggtctccggactcacaggctggtgtgcattgtggtgatcagagctcactgcagcctcaatctcccaggctgaagcaattttcttgcctcagcctcccacgtacctgggactacaggcatgtgcccccacactcaactacttttctccaaaaacatttttgtacgaatggggacttactacgttgcctggctcatgtcaaactcctgggctccaactgtcctcctgcgttggcctccccaagtgctgagattacaggtgtgagcttgctcctgcagctaaattcttatatcttaaatccctacctcccacaagcagatgttaggcccacttattttatcactttttgctgttgatgtctttttgtccctgggcacagggattagtgacccactttccaccaaatttcaaatcattagggacattatgttgtgtcccaggagtggctgaggcttcaagtacctgctgctctaacctaggcctgctgaggagtacaattcatcttgtgtttctgtgttgtttaacaaccttcctgagctcctctaagtcagtccatcctgccacaactggcaagaatcaagaaactctccaagaaaatgtttctcaacctgcctgttgtcaagtagaagaggtctgctgaccacggcaggcatggcagtgcatgacagtgagcgccccccaccgtgtttgctattcactgcatgttccgcctgaacgttcccgtctgctcagtgagtcttgacagtggggtaaaggggtctcactctcaaagaccaaggctgaccctctctgaatacaatgccttgacctagttactgtcactgtggttttgtcttcaggactaaaagatacaataagaatttgttcctttaattgtcctgttgatgcacaaaatacttaaatgcttctacataggtctgctcttgtgcatcacagagcactaagggaaagtccccacggtaaaagtgcttttcacctgagctgctacgtgtgacagtaaagcagctgaaggttaaaaaaaatcaaagctccccaaatatgggtataacagctggtccaacctcacagtctgtactttccctctgtaacagcatggataaatagagataactagcaactgataccctagtgtgccaagcaattgatgtatctgtgtgattaaaaaccagcatttagccatactctagatacactaaatatcaaccccacactcctagcctgtaattccactttgcttccagatagcagttacaattggaaaggaaatacctagtttacaggaggcattaatacttcattgttgcagaaactaaacccttaaaagaatgtaacctggactttctgacctggatactaacaaatagtgaaaaatatgtatctaagaatacacttggaacagaaatgtgaaaaaccaaaagtaagagatattatgaaggatcaaatataaaatgacccagtgctgaagaggcaacaaagaaaattgtagaagaaaatgacaggaggcattatgccttaatgagtttgtgctactgtataagaaaatacaataggctgggtaatttctgaagaagagaaattatttctcacagttccataggctggaagtccaagatcaaggtgccagcaggattggtgtctcgtgaggacctggcctttgcatccaagatggtagcttgtgcactgtgtcttcaggaggagatgcactgtgccctcacatggcagaaggcagaagggcaaaacaggagaagcccactccctccagtccttgcataaggaccctgaacccattcatgaagattctcccttcatgactgaatcactacctgagggccctacttcctaatcttataactttgtgattaattttaggggaacacattcagaacatagcactctatattcaattttttaaaaaattattttgttgttttgcttttctgtttttcaaatggcttaaagtgcacaaaatttgattaatcatattccttggctcatagcataccttggctcctatttcatctttgtctgtgcctgggcctgtatgtaaatgtatttgaatgtatttgaataatatggtaatcacttgtgaacccacaacacaacccaagaactagggttctgaccctaacatctgctcctcctctgtcctttttcctgatttacacccttcagtcccagggtaactactaccctgaatttatgtttaggattccctgcctttaaaaaaacattgttttattgcatatatatgattgccctaaatgacatattatttagttttttaagggtataatttatttacccattcttctattaatttacccattctcctattaatgaaaatctggcttgtttccatatattcgctattatgaatggcattacattagcatttatttttctactacttctggtacatatgggcaagagtttctccagggcctatggtagagaaattactttgccctaacatatgagaatgctcaactttatgagataatccaaattgttttccaaagtggttgttctaatttaaactctcacctcctgtattagttcgaaatgatcttgttgatccacagtctctccatatttggtgatatggtttggctatgtccccactcaaatctcagcttggattctatctcccagaatacccacatgttgtgggagggacccagagtgaggtaactgaatgatggaggccagtctttcctgtgctattctcatgatagtgaataagcctcatgagatctgatgggtttctcatgggtttctgctttggcttcctcctcattttctcttgctgctgccatttaagaagtccctttcacctcctaccatgactctgaggcctcccccaccatgtgggactgtaaatccaattacagttcttttcctttacacctctttttcttctcagacttgggtatgtctttatcagcagtgtgaaaacggactaatatagtaaattgataccagtggtgtggggtgctgcagaaaagatacccaaaaatgtggaagcgactttgaaacttggtaacaggcagaagttggatcagtttggagggctcagaaaaagactggaaaaggtgggaaattttggaacctcctagagacttgttgaatggctttgacaaaaatgctgatagtgttttgaacaataaggtccaggctgaggtggtctcagatggagatgaggaacttgttgggaactggagcaaaggtgactctcattatgttttggcaaagagaatggcagcattttgcccctgccctagggatttgtggaactttgaacttgagagagatgatttaggttatctgctggaagaaatttctaagcagtaaagcattcaagaggtgacttgggtgatgctaaaggccttaggttttataaaggaagcagagcatacaagtttggaaaatttgcagcctgacaatgtgatagaaaagaaaatcccattttctgaggataaattagagcagtctacagaaatttgcataagtaacgagaagctgaatgttaatccccaaaacaataggggaaatttctatgggacatgtcacaggtcatcacagcagcccctcccatcacaagcccagaggcctaggaggaaaaaaatggctttctgggctgggcccaggttgactgtgctgtgtgcagcctagggccttggttctctgtgtttcagcccctccagccatggatgaaaggggccaacatagaactcaggccttggccttgagagtgcaaacaccaagccttggcagcttccacatggtgttgagcctgcgcatgcatagaagtcaagaattgaggtttggaaacccccacctagatttcagaggatgtatgaaaattcccggatgtccaagcagaagtttgctgcagcggtggtgctctgatggagaacctctgctagggctgcgaagaagggaaatgtggggttggagcccctacaaatagtccctactggggcacttcctagtggagctgtgaggagagggtcactctcctccaggcctcagaatggtagatgcactgtgagcctggaaaagctgcagtcactcaacatcaacccatgaaagcagccaggaggtgggctataccctgcaaagccacaggggcagaattacccaaggctgtgggagcccacctcttgcatcagcaagagcttgatatgaaacatgaagtcaacggagatcattttggagctttaaaatttgactaccttgctggatttcagacttgcatggggcctgtaacccctttgttttggccaatttatgccatttggaacagctgcatttactcaattacctgtacccccactgtatctaggaagtaactagcttgatttggattttacagggtcataggcagaagagacttgccttgtctcagatgagatttcagacaggggacatttgggttaatgctgaaatgagttaagactttgggggacggttgggaaggcatgatcggatttgaaatgtgaggacatgagatttggagaggacatgagatttggaggggccaggagtggaaaaatatggtttgactctgtccctacccacatctcacttgaattgtattgctcagaattcccacatgttcggggagggaaccagggggaggtagttgaatctttggggccagtctttcccatgctattcttttgatagtggataaatctcacattatcttttgggtttatcagtggtttcatcttttgcttcttttgcctccttctcatattctcttgccactgccatgtaagaagtgctgttcatccaccgtcataactctgaggcctcctcaaccatgaggaaccctaaatacaattaacccactttttcttccctgtctcaggtgtgtctttatcagcagtgtgaatgtggactaatacattgggtattgtcagacttcttaatatttgtggggagaatagatgtgtagtatcttgggcattttcctgattactaatgaggttgagaaattttttacattctgcaggctttctcttttgtgaaatccctattgatgtattttcccaattttctgttgggttgctatttttaaaattaattcataggagttccttatatttagttgatatgattttaatctttcataggttttaggtgctgcaaatatcttctaatttatagtttatcttttcacttttttacttttattttttaattttttttttttttgagacagtgtctagctctgttattcaggctggagtgcagtggctcactgcaacctccacctccagcgttcagatgattctcgtgcctcagcttcctgagtagctgggattacaggtatctgccactaatgctgagctaatttcttgtatttttaggagagacgaggtttcaccatgttggccagcctggtctcaaactcctgacctcaggtgatgtattattggggttacaggcttgagacaccgtgcccagcctatctttccactttttgatgtaaaaagttcttaattttgcgatagtcaaaatgtctaatctttttaaatggttaaatggctttttgtgtctcattcacttacattttctactaacttcaaatctggcttctgagtgaccttttcagagattctccaatgtacccaagtaaacaaaataactgacttctatgttttttcattttattttatgattaaatatcaaaatattgaaataaacaagatatcctatgtaggttttctttctatctcaagttctagattttgaggcctttgaagatagaaacaacggaatcaggtccttgaacacaggagttagtcagtaagcatttgttgaataaacaataacaggacatctttccactttcctaaaactcatcaaagaattcttactcattctgatccgtcttcccttatgatgagaccaaaccactcactgtggtcaacggcattcaaaaataaaaagtgggggatttccagaggttaaaaaatgtggacaaaactattttaaatattcatgtatttatgaactgattcattaaaaaattctcactattaatatttgcacatcattagggaccgtgagtatagcagagaacaaaacagaaaaattttccggccacatgaaatctatattctagaggacagaagaaatggtctgataagaatcaggaaagaacatgatacgtccagattaaatcgtaacctttatgtagaataagagtgaaatcactgtaagctatgttgatatttgaccaggctacttgaacacttttagataagtgctttaaagccattggtggcttttgaacaaggaactactgtggtcactgaatttcatgacagagtgcaatagaagtggaaaatgtacatataaatattctcaggccccaatgtgccatatcatggaaactttgcaattttccagatgacagagaatagaaatttgagacatgacaatggaaatgatagtgaaaggatgaatgttaaatacactgcagaggagtaagaactggcaagaattgacaaatgatgagttaagcaaggtatgaaaaaatgaggagtcaggtgagtaagaagggagggggaataaaatgcattgcttaataacagagatactttctgaaaaatacgttgttggacaatttcattttcctgcaaacatcgtagagtgtacttacactaacctaaattgcagcccactactacacaactaggcaatatggtataacctattgctcctaggctacaaaactttatagcatgttactttactcaatactgtaggcaattgtaacacaatggtagatatttgtgtttctaaacaagcaacaacatagaaaaggtacagtaaaatacagtaagatagtcttatgggtctaccatcatatatacaagtctgtcattgaccaaacattgttatgtggcgcatggctgtaatatggtatcatgttaagcagaaagtctcaaccttcccagttgaggcacactgataaaaactataataagaaatgtgttactgattacaaaatctcataattatgagcaatttgttctttcataaatttaagagaatttctccagaataacaacactcactttcattcctgtatgcttgtctttaaaagtagaaggaaaagttgatgaaagtatggctaaagttggaacttctctctcttctaccctggctgcagcattagtgaataagtataatttttatgactataacaattaaatatttctctttctggactttacttttccagaaagagaatctttggaggaaaagctgatctgtgaggcagtaaaggaaaaatgttaatgtttatgccctatgaacctttagaagaaagtcattttttgatggaagcttgcttgtgtcaatacatgcatgcatggaaacaaatattctcttcttccccatgtcttttctatgctatcctattccaccagtcctgaattagtgcttttgttctgcagctaactctctcaagtttgtctttctgaagtccgaatctctctcttgaatgtttctggcctcagtacctaccctgtaaacgcgctaaacctgatccatttacagactagatagtttttggtccaaaagataattcatggaatttccctaataaatgtatattaatttatattactttaacaattgattttcgttgatcctgatgaggattgcctattagttgattactatgtgtattctgtaaagatatacatggctggcagaaaagaagatattttatgccataaaatattatggacaattttttaaaaataagactatgtttttcctgaaacaagctatttctacaaacatatgctttcatgaaattttatttctcatgatacctttatgattaccttattgtatgctgactgtattaataaagttagagattctatgaagttttaagagattttctctcttttattattttttttctttaagttctgggacagaacatgtacagaacatgcaggtttgttacataggtacacatgtgccatgatggtttgcagcacctatcaacccatcatctaggttttaagtcacacatgcattaggtatttattctaatgctctccctcctcttgctccacaccctccaacaggccctggtgtgtgatgttcccctccatgtgtccatgtgttctcattgttcaactcccatttatgactgagaaaatgcagtgtttgtttttctgttcctgtgttagtttgctgagaatggtggcttccaacttcatccatgtccctgcaaaagacatgaactcattcttttttatggctgcatagtattccatggtgtatacatgccacattttctttatccagtctatcattgatgggcatttggattggttccaagtatttgctattgtaaatagtgctgcaataaacatatgtgtgcatgtgtctttatagtagaatgatttataatctgttgggtatatactccataatgagatggctgggtcaaatagtatttctggctctagatcattgaggaattgccacactgtcttccacaatggtggaactactttacactcccaccaacagcgtaaaagcattcctatttctccacagccttgccagaatctgttgtttcctgacattttaataatcatcattctaactggcatgagatggtatctcactgtggtttcgatttgtatttctctaatgaccagtgatgatgagcgttttttcatatgtttattggctgcataaatgccctttttttttttgagtcggattttcgctcttgttgcccaatctggagtagttaacagaacgatctcggctcactgcaacctccgcctcctgggttcaagtgattctcctgcctcagcctcccaagtagctgggattacaggcatgcatcaccatgcccagctaattttttgtatttttagttgaaacggggtttcaccatgttagccaggctggtcttgaactcctgacctcaggtgatccacccaccccagcctctcaaagtgctgggactacaggcatgagtcaccatgcccggccctcaatgtcttcttttgagaagtgtctgcttatatccttcacccacattttgatgggattgtttttttcttgtaaatttgtttaagttccttgtagattctggatattagacctttttccaatgggtagatcacagaaatgttctcccattctttaggttgccagttcacactgatgatagtttcttttgctgtgcagaagctttttagttcaattagattccatttgtcaattttggcttttgttgcaattgcttttggtgttttagtcatagtctgctcatcccttcatcctgaacggtattggctaagctttcttctagggtttttgtggttttaagtctttaatctgtctcgagttaatttttataaggtgtaaggaaggggcccagtttctgttttctgcatatggctagccagttttctcagcaccatttatgaaataggcaatcctttccctgttgcttgtttttgtcaggtttgtggaagaccagatggttgtacatgtgtggtattatttttgaggtctctgttctgttccattggtctatatatttgttgggtaccaaaaccatgctgttttggttaccatagccttgtagtacggtttgaagtcaggtagcgtgatgcctccaactttgttctttttgcttaggattatcttggctatatggactcttttttggttccatatggaatttaaagtgtttttttttttctaattctgtgaagaaagtcaatagtagcttgataggaatagcattgaatctataaattacattgagcagtatggccattttcattatattgattcttcctatccatgagtatggactttttttttccatttatttgtgtcctgtgttattttcttgagcagtggtttgcagttctccttgaagaggtccttcacgtcccttgtaagttctattccttggtagcttattctttgtagcaattgtgaatgggaattgacccattatttggctctctgcttgtctattattggtgtatatgaatacatgtgattttttcactttgattttgcatcctgatactttgcaacttaaagagttttgggtctgagacgatggggttttctacatatacagtcatgtcatctgcaaacagaggcaatttgacttcctctcttcctattggataccttttatttctttctcttgcctgattgccctggacagaacttccaatcctatgctgaataggagtggtgagagagggcatccttgtcttgtgccagttttcaaagggaatgcttccacttttgcaataagtgtttattgtgttgaagttttgtgaaaatagtagattagatttttctaccaattgcgtatcttaaaaaatcatttagtacacagtttttacgttttaagtaaaagagatcacaagtgactaattaaaataacaatgagagtactgtaagtattccaaaatagttttttctagtggtgatatttagggtgtatatttggtttggattttgtgtatatgtatttctaagttacctacagtgaatacatttgtggacatcaaacactctatgtttctttttttgtgatagcttgtgcctgacctaattctacattagcgagcagattgaagaagtgaggagacatcagatagatgtagacgcttcaccaaggagtccccctgcagtgccacaggggcagtaggctcacttattccatatccttggcatttgcagggatagacatacacagggaggcatggggagctcctgaggagcaaggacagatggtcaatggtgggaaaaagttacagtgccatataccctctttcttttaatggaaactcagggatggatggtctggccataaactattaatagtacctctggaaaataataatactcaatacagggcccatcaaaactgtttctcaaatttaaaagagccacagggttgcagaacggggacttagaaatattagaggcaattatatttaaaatggatggtcacaaaaccctgattctgggttagtatggtttgcctcctcagtaaataagacatggaatcatagcagtaaaagtattttgagtctggcattttacacatagaaatgtgaatccttttttacatttaaaaaatgcaaatcaatagaaaatatgtggttttatacataggatttttgtttaaggactgtattttagtgcacagtcttctacttaacaaaatatgtctgcattcaaaacaaattatttgctatgaagcagagagtgaaatttatcagggtcttaatattataagttaaattttatattttgaggttattaccctggtttggattttgtacatttacacaacaccttacagaagtggttttcaaaccacattccacagaatgtccctttttaaggctaagtaatgttccactgtatatctgtaccacattttgtttatccattcctctgtcaatgaatgcttccaccttttggctatcatgaataatgttgctatacacatgaatttacaaatatctgttgaagtccctgctttcaatttttgtgggtttaaacccagaagtggacttgctaattgacatagtaattctatgtttcatttttatttatttatttatttatttatttatttatttatttatttatttttgagatggagtctgactctcttggctcactgcaacctccacctcccagattcaagtggttctgctgcctcagcctcctgagtagctgggattacaggcacacagcaccactcccagctaatttttgtatttttagttgagacagggtttcaacacgttggtcaggcttgtctttaactcctgacctcatgatctggccacctcggtgtcctaaagtgctgggataacaggcacgagccactgagcccagcctatgttccatttatttttaatttaggaaccactgtactcttttccaccctgactatactgctgtagagtccaccggcaatgtacaagagtttcgacttggttacatcctcaccaacacttgttattccctgcttttttgatgattgccatcctcatgtgtatgaagtgatatcttactatggttttgatttgcatttccttagtaatcagtcatgttgagcatctttcatgtgcttgatggccacttgtatatcttttttgggaaattttctatgtaagtcctttgcctactttttaattgggttgtttatttattgttgagttgtaggaattctttatatattctgcatattgatcccttatcaaagatattatttgaaatattttcttccattctgccagttgtcctctgattgcacaaaagttttaaattttggtgaagtccaatttacttatttttttcttttgttacttatgcttttggtgtcagaaagcttttagtttataattttaactatatcatgtctcctgcctcatatgtaccactggacaaggtcccttttatgtgctcagcttctgtcagaggtaaatgtattttgaagtggagaatgaagataattgcaaaactggtctggagaacaaaggtaattatgaaagttccagatacaaggagagagggctcaatatgccagcagttctctaccaatccatcctagtattgcctgaataatgcaggggatgtgtgcaagacacacaagtgttccagaagcatgtaaacaaggtacagagaagaggataagataaaataagatgagctaagaatattaggaaagccctgttcagaagattgcctacagaggcaaaagggacagtttcattttgctgagggaaacagggtggtaagaagcctcgtggggaagatccccgcttaccctgatacagagaggtgtaaaataatgtaatgggagagcattaggctgagatagctcccatggcctgggttcgtacatagacaaaatgaaacaaccttagtccaccaagtggcccactgagtattagctgcataatgagagacctaccaccaggatagttcaaataatgcaactgcccaaatttttgccaaacaaataattgctctactctacttctatattcaccctataaaagccttccctacaaacgcctccagtagatcctccaaccactttcagtttggagctggctgatccgtgaatctctgtttgcttaagaaactctttaaaatgttaatatgcttaagtttatctatttttttctcatttttaaaaattgagatgggattttcctatgttgtccaggctggtcttaaactcctgaactcaagggatcctcctgcctcagcctcctgagtagctggaattatagacgtatgcctccacagccagcttacatttatctttaaacaagggtttgacccctttctgaaatgtatttgtgttaaaacctgtaccctaagtgatatggcaggctcattttagaccattggacacttttgtgtctggaccacaatttgccctctgtgacctgctctcctaagaaattcaagtgtaattcaagttagtttaccctctgctgatcaggggagattgctctgggtgcaaattcaagacaggcactcacaccttcattcgtaccccaaatctcagcatcacacagtacactcatgtaataaacctgcagaggtacccactggaatctaaaatgaaagttgaaattccctaaaattttaatctcatcttactaaaaaacaaagataaatttacttctttccaattttgacatatattatactgacatacactctatattctatggtgaattatattgattgaatttcacattttaaactaacactgagttactgtgaacaactctattgtgtcataatgtatttcgtttttaatatattttaatacaatttgcaaatattctgttttcaaattacatctttgttccataaataaataaatatgtaaaaaataataaatatttatattattcaagtgacgattatagcgatctttttgaatatctacttaacctcagctagctttaaattcagaagtagcaactccatagaaattcaacttatttctaccttattactcatacttgtctccttgaagacgcttcattgctatcaaccagtttagactgggatgtcacagatctctagactgagtagtataatactcactattcaaataaaatcaaattattataatgtcatgacacctccaaatacaaaaacgaagcccatggatgttaggttaaggtatagagacaagtattcctacttactatcttttagggaagacatataacccagctaaggtgattgcaaaataaaatggaaaccatattgtggaaggggactcgagactcagattggattttctttttttgttcttttttttattattatactttaagttttagggtacatgttcacaatgtgcaggttagatacatatgtatacaggtgccatgctggtgtgctgcacccactaactcgtcatctagcattaggtatatctcccaatgctatccagcccccctccccccaccccacaacagtccctagagtgtgatgttcccctgcctgtgtccatgtgttctcattgttcaattgtcacctatgagtgagaatatacggtgtttggttttttgttcttgcgatagtttactgcattctcagattggattttcattccaactcttacatacacaagctgcatgactctgggtaaattgcatattctcttagagtttcaatttcttcatctgtacaatggaggttaatgcctacgggctatggctgatgtagggataaaagaaccaacaaggatgcatgggcagggcctggtccatagagcagctggcatcaacaaatggaagcccccttcccatcttgtctttgcgtgcaaaacaaaatcctgaatatgtgggtataaaaagtactcttataagagaaaaattggaaacttttgcaaaaagagattggaaaggtgtcacatcttgtggcatgaggatttgtggacatacacttgaactttgtgctgtgagatatccacagaacttcagtagcttaagagaacagtttagatgtcatcttattcatctaccatagaacttcttcttcttttctgagatttctagacagtaacttttacagctctaataatgcagttatctcccaattgtttggacttttctaatagatacaaagcagtatttcaccagcagatgctactgcagttcatatggtgatttcaaactaagaatccctttaaagttatgcaatactttttttttttggaaatagggtgaaagtactttaagattaaaatcctatgaaataggtttacagtaaataattatttgttgcaatgtctatcctaatatcttatattcacacatgtatcggtgtcctaataaatatatgtggtgaatgaaagttacttgagggcagagactgtgccatatgttccctgcaccactgatgcctatctcagcacgtgatgtacagtagatgctcagtaaataacttaaaaaacgcactaagaataaatcttagaagacatcaaaatacatatgagtacaatctagggacatggtcaggagctcaaaattcaaacttatgtatttattttttatttagagacagagtctcactctgtcacccaggctggagtgtggtggcacgatctcggcttactgcaaccttcctctcccgggttcaagcgattctcctgcctcagcctccagagtagctgggtttacaggtgcacactaacacgcccgactaattttttttttttatttttaatggacacagggtttcaccaagttggccaggctggtctcaaactcctgagctcaggcgatctgcccactttggtctcccaaaatgctgggattataggcatcagccaccgcacactaccacagaatattttaatgtagcttcaaaacccctttgcaaataggtgtattcataacaagatgcaaacaagaaaacattgagcttcatataatagaagggttctgcctggatttgcatgtggccccatcatttgtttgctgttgggccatggtcaggttacttagctgctctctgcctccacttaggctttatgcctgtgcatccctcatctacaaaatgggaataataagaatatctaacagttagaagtggagaaaacatatataaaggcctttcaaaagatcttgtcaaagctcaataattgtcctcaataattgctctcaataattgtcagctattattcagtaataatcataatcatgaaaatatatgactcaaagaaagattcctacttcatatccagcttcccaaaagaatatcagacattggacctgtgaaaggaatgacattgagatttattttcacatcgctaagttggttttttctttgccattcaatttctgctgtccccactctaagcccatggtccaccattttatttttccttctaagatgtcttcccttcttgtaagattttctttgccttaagaagggcccttttcatccacccactcttttacccttcccagaagttggttaatgggcacaaaaatacaattagatggaaggaacagaagaagttctagtgttcaatagcacagtagggtgatggtcgttaacaataacttattatacatttcaaaatggctggaggaaagatgtggaattttcttaacacaaataaatgataaatatttgaggtgatggatatgcaaattgtcttgatttgatcagtgcacactgtatgcatgtatcaaaatatcacatgaaccctagaaataattataattgtcatgtatcaataaaaacaaaaagggcttatttctctttccttcctcccagcattccctcctatcccagatatgtgttgctcctggggctctcctgccccacattcagtcagcactgagccagcaggagggatttcacaggtcatatcctgagatcaaccctccaccccttcaggtaatgatcctcctgctcttagtcatttatatcctttggttcatagatattttgagtcaagtgccttctaaccgctgagctacataatatcccttggtttttaaagataatacaaagtggattttagcaacaatcttgagtcatcacagaagctaatgaatttggggattccatgaagccatccaagcacataaagcccatttcctgggtccctttcccttagctcaaggccacaaaaatcagaacatgaattccagcccatatttgcattatgtctaaataattatgaattataaatgaagctaaaaatagctaaatatgttctattcttctacttcaataactataccgccataataacccacaaggtcaaagtcgagtgtagaattctctgagttcttggtgctctgcacgggaatgtgttagtaaagggagagctgatcctcagccccaggctatttttttttctttcatcatagctagccctgtccttacttgagaaaccttgcctacccctgtgtgggggactccctaggccccatgcaagctccatccacaattctcaccccttcagacagcagagccttgggcaccatttggacaagcacagttttcactttgaaatggacccagggaagaggccatgcgggctcaggtacatttggccaggggcctgagtgcccagcatgtgccctagaagagagggtgagagctctgtgtgggccggggtacagtcagtggagggccagagaggcaccttctcaagctcaggattcagggcgggggtcctcttgccaagatcgatggctacgattccttcgtgcaatgacgactgcgtcaagtcttctcagagcacctttctttcagtctcagccaccgtggggagttccatggaagcacaggcttcccttgtgctgccagcaaactcaagctacgctttctgccctgggacatctccactattgtaggattttgcctaagcacaaatacagcccagaaacacttgcaggtcaacagcctcaggggaagacctcaaccagtgtgggacaggtgggcaaatgctcgaggctcaagtttcaggtggacagtcctggataactttccagagcctctcggaagttcccgcataaaaaaaggccatgggagcagcctcaatggcattctattattttggcttttttttcttgcctggctcactcttcccacatctcacccttgcttcttggaatcacttcccaaataaatcatccacacccaagtatttactccagctctgctttcaggggtacaggcacaccttggagatattgcaggtttggttctaggtcaccacaataaggtgaatatcacaatagagcaagtcacatgaaattttttgcaagtcataagaaattttttgctttctgatgcatataaaagttatgttgccaggcatggtggctcacgcctgtaatcccagcacattgggaggctgaggcaggtggatcaccagaggtcagaagttcaagaccagcctggccaacatggggaaaccctgtgaaaatacaaaaatggtggtgagcgcctgtattcctagctactcaagaggctgaggcaggagaattgtttcaacctgggaagcagagtttgcagtgagacaagatcacaccactgcactccaacctgggcaacagagtgagactccatctcaaaaaaaaaaagttgtgtttaaactactgtagttaattaagtgtgcaatagcattatgtctaaaatataatgtatataccttattttgaaaatacttgattgccaaaaaatgctaaccatcatctgggccttcagcaagtcatcatcattttgctggtggatggttttgtctcagtgttgatagctgctgactgatcagagtgatggttgctgagggctggagagggtgtggcaatttcttaaaataacatgacagtgaagtttgccgcgttgactgactcttgctttcacaaaagatttcactgtagtattctacaccgtttggtagcattttacccacagtagaatttatatcaaaactggaaccaatcctctcaaaccctgccactcctctgtcaactaagtttatgggatattctaagtcctttgttgttctttccacaatgttcatggcatcttcaccaggagtagattccatcccaagaaaccactttctttgctcattcataatgagcaactcttcatccattatgattgcagcaatctagccaggtgcggtggctcatgcctgtaatcccagcacttttgtaggctgaagcaggtggatcatctgacgttgggagttcgagaccagcctgaccaatatggtgaaactccgtctctactaaaaatacaaaattagccaggtgttgtggcacatgcctacaataccagatactcggggggctgaggcaggagaatcgcttgaacccaggagttggaggttgcagtgagctgagattgcaccattgcactccagcctgggcaacaagagcaaaactccatctcaaaaaaaaagattgcaacaattcactcacatcttcacgctccacttttaatactagttctcttgctatcttcaccacatctgtggttacttcctctgctaaagtcttgaacccctcaaagtcatttatgggggttagaatcaacttcttccaaactcccattaatgctgctatttttacttcctctgggaatcatgaatgttcttattggcatctaaaatagtgaatccatttatagagcacgggtagagtagatttagtgtaattcttaagaggtgccctaggatttatggaatggcaaataagcattggcttgtaataagagagtcagtctgtcctttaaatcttttttttttcttgagataaggtctcactctgttgtccaggctggattgcagtggcaagatcttggcccacttcagacttgacctccttgactcaagcaatcctcccacctcagtctcctgagtagctggactagtagcatgcaccaccatacatggcttattttttttattcatttatttttggttagagacagggtttcaccatgttgcccaggctggtctcaaactcctaagctcaagccattctcccacttcagcctctgagagacgtgagccacccttcctggcctctaaattcatgttatgtagactgattttcatggttaaaatgtcctgaattgactgtgatctgttgggaggtgggatggaggaaactgcttatggaaattgaagaagaaagggaagcacaccagaagcaagaaagtgtcatcgatttttacatcaaagactccatggtaaagagaaagaacaggtagcctgtttttgtggctgatcattggactgcagactgcacctgcatctaccaggttcttctggatagtcctagttttaaattgttgacctggcattcatgaacacagtgctactggtcagacctttgtccaggtttaagcttcagaaaataaggtcttcatgcagtgggaggcctggttagggtatgattcagccctggggcatctgtcccttctgacctggaggtaaacttggcatctacaatttacctccacatttgaacagccaagaatgggctgagcacaaaggctcacatctgtaactccaacattttgggaggccaaggcagaaggattgcttgaggccaggagttgtagaccagcctgggcaatatagtgagaccttgtctctgtaaaaacaaacaaacaaacaaaaccaaggatgggtgggtggcagggagcagttcaacatgggaaaccattaatctgagagctggaaggacccttagaccagccccctattaacagatgagactctgccctgggattatagcctaaggtaatgtattgaagttttctagagatttgaaaataaacaatcctaaaacccccaagcatactgctactgtttgctattgaatagtgttttctagtccaggtgtggtgggtcatgcctgtaatcccaacactttggaaggttgacgcaagtggatcacctgaggtcaggagttcgagaccagcctggccaacatggtgaaaccctgtctctactaaaagtacaaaaaattagcaggccatggtggtgcatgcctgtaattccagctgcttgggagactgaggcaggagaatactttgatcctgggaggcagaggttgcagtgagctgagattggaccattgcactccagcctgggctacaagactcaaattacatctcgaaaatactaatgacaataataatgttttctacaagtaaggggttactttgtactgggaactggtgcaaagggatccaccatgtgtcagcttttggattgatgacagttatttccagatcatggaggtgggaatgcttgttgatcatcttctgtgttctttgttatattgattgattttttaaaaaatctagcatttttataacaatgaagtcataaaaataagtaactaaaataaagtaaaataatctaaaaaggccaagtgtggtggctcacacctgtaattccagcactttgggaggccaaggtgggtggatcacgtgaggtcaggagttcaagaccagcctggccaacatggtgaaaccccatctctactgaaaatacaaaaattagccaggcatggtggcaggcacctgtaatcccagctactcaggaggttgaggcaagagaattgcttgaacctgggagaaggtgcttgcagtgatctgagattgagccattgcattccagcctgggtgacaagagctaaactccgtctcaaaacaaaacaaaataaaaatctaaatgtaattgagttgaatatttaaacttttaattcacatttccaattagattctaattccatttaaaagagcatctcatagaagcaaatgtactcatttatgttaactctgtggtttcatttaagcaatttgttttgtgaagggacacaaatccaagcagattttaacagtgcataaatacgtatttattaatttaattacaatgacaatactctcaactccccatttgaatataggagagcatcggatctgtgttctgggacagcgtgcactgtaggtgtgtggaaataccgatgtcctcagctgtgtggcaggctcagtggaacctggagtgcaggagcccctgggccattcacctctggccacaaaagtcattgttcatttacccccaactgctatagaaatattattttcagtggttgttatgatgcaaaagaaaagatgcagggagatttattaaaactttacatataagttatgttagtaaataaagtctactttcttctggcttaactaaaaatctttactagtatttatgcattttggaaaataaagatgccaatttaaatattatgaagcaaagcaattgattattaggtaagacagccaggtacaactgcagaattgtagaggttatgtgttacatgtataagaatatttcatagcaataatcttttaagactatgtgaagacactccacagtgaagcagaaattagaacagaattaataatactgtgtatgctctcagttcaccaatttatcaaaactagctttataattcaggagactgtctgctcttttgcaattggaagaaaaggaataacattttatttttcaactctttagattttcttcattaagagtatttccaaagctaagtaagggagttgccagtagcaccaagagaaaaaagcagtcttgagcagcttttaaaaaatggtcttaaaatatggaaaatggagccaggtgtggtggctcactcttgtgatcccggcactttgggagcttgaggtgggaggattgcttgaggtcaaaagtttgagaccagcctgggcagcatagcaagatccccttcgttacaaaaaataatatattttttaaaaattagctggatgaggtggtgcatgcattagagtcccaattacttgggaggctgaggtaggaggggttcttgagcccagcagttcaagtctgcagtgagctacgattgcaccagtcctcaagcctgggcaacaaagtgagaccctgtctctctctctctctataaatatatacatatatatatataatatatatatccatatatatatagatatatattatatatatatattagtgctggcaaatatcagaacttttataaagctacagcaattaagacagtgtggtcttcactgacaaagtgactaatgaaacagaatagagagttcccaaacaaatctccacaaatttaatctttgatatgtgatgtaggtgacatggcagttcagcaaagaaagaaaggacttttcaataaatagaatagaaaaataatggttattgatatagggaacaaaatgaaattatattcctgcctcactctatatacaaacattaaattccagaggaccacagacttacatgtcagaaagaaaactttaaaacttttagtagaaaatgtaagtgaatgagacacaaaaagccatttaaccattaaaaaagattagacattttgactaacacaaaattaagaactttttacatcaaaaagtggaaagataggctgtgcacggtgtctcaatcctgtaatcccgacagtacatcacctgaggtcaggagtttgagaccaggctggccaacatggtgaaaccccatctctcctaaaaatacaagaaattagcttggccttagtggcagacacctgtaatcccagctacttgggaagctgaggcacgagaatcatctgaacccaggaggtggaggttgcagtgagccactgcactccagcctgaataacagagctagactctgtttcaaaaaaaaaaaaaaaagaaaaagaaaaagaaatttaaaaataaaagtaaaaaagtgaaaagataaactataaattagaagatatttgcagtatctaaaacctatgaaagattcaaatcagatcaactaagtataaggagctcctatgaattaattttaaaaatagcaacccaacagaaaattgggaaaagacatcaattagggatttcacaaaagagaaagcccgcaaaatgtacaaaaaattctcaactcattagtaatcaggaaaatgccaagatactacacatctattctccccacaattattaagaagtttgacaataccaaatgtgttagtccacattcacactggtaataaagacatacctgagacagggaagaaaatgaggcttaattggatttagggtttcacatggttgaggaggcctcagagttatggcagcggttgaacagcacttcttacatggcagcggcaagagaatatgaaaaggaggcaaaagaagcaaaagacgaaacccctaataatcccatcagaccttgtgagatttatctactatcacaagaatagcatgggaaagaccggcctcaaagattcaactacctccccctggttccctccccgaacacgtgggaattctgagcaatacaattcaagttgagatgcgggtagggacatagtcaaaccatatttttccactcctggcccctccaaatctcatgtcctctccaaatctcatttcctcacatttcaaaacttattaagccttcccaacagtcccccaaagtcttaactcatttcagcattaagccaaatgtgcactgtccaccgggcacaagcatgaacaccaccgtttgtttcactgtcaccccatatgcctccggtgacacacaatcacaccatctgctctgggatacaccagtaccatgcctggccacatggtctccacctcggattcacccctgttcctgtttgcacgtgtcctgtaaagcactctcagctttccagaggcccagagcttttagaagcggggcacactgctctttcaaaggaggagggaggcagagggctgatggatcagtgaattttcagctgacaacacgccttaagacccatggtatcgatctgtgctgcagcgaggccctgcctgccacatcaggtgtggtgagcccatcctatctcacttggaaggggccaaaatcggatctgaaggggagtcccgagaacccagcaggcgtcctgaagctctccctcccttggtgggagtcggctcaaggaggtcctgaggacaggactcctgtgggtttcgcgctgggacaggacccccgcggtcccctctcaaacgccacccccaactggaccccggatccagccttcgctgcagctgcagcaggagactcgctgccgccgtgcagcggtggacttaattaaaggggaggcagcctgactgccaggagccgagagcgagtcggcccagccaatatgcatgctccagacgcgagcagcttctcctgtcaaagtgcttcccacggttgtcttagaaaccggtccccgaggattggcagagcaggagccctctgtggctgctctctcacccgagggtcattctccccaagagcagaaccccgcagcctcagggtttgcctgggggtgtgtttttcaatgcctctgctgtatgaatctgtgtgtgtctttgtgtgtgtgtgtgtgtgtgtgtgagaatgtgtgtgtgtgtaactcccattctctcttctctctttgtctcttggtctctgtgtgtttctttccctctctctgtcggtttgtgcgtgtgtgcccgtctgcgtgtgtgtctttggccgaatgcgccctgtgcaccacagagcaatttctcacatgtcggcctgcctttggtgagcctttttctgcgtctctgcctgggtcgtgaggccggttgtcaatcatctttgccgccgcggatccgctttgggagtgtgaaggcctggcccacgtgaggagacgcgtcggtcccagagcaattgaaatctcatccccatcgtgagcggcctcttttctaggatcaagatgaacacactgcagccaaggacaagagccccataggagctctttgtcctgcaggacaggagcagacccacgtcagagaagatggttgtatcttttcacggcttttctctgagaaatgaagccacactacgatacagtctggaagaggaagccgggaatgggagatggcagcaatccctgtcactggaacgctggcctctctggacaagccacccttttggaacccgaccccttaggcccgtggtggtggtatggtgctgtatcctgcctgggctctgggctctggcctctgctccatcctccctcttgctgtgcctcccctgtttctcagggacctggatgcctctcgctctggccaaatgtcttcaaagaagatgacctcccagtccatcagggagacacttcctggatatccatgccatgattatttctctctccaaacgtgtttctgcttgatttgggaagttttgaaactctccttttgtagaatctgcaactggatatttggagcgatttgaggcctatggtggaaaaagaaatatcttcatataaaaaatagacagaagcattctctgaaacttctttgtgatgtgtgcattcaactcacagagttgaaccttccttttgacaaggtagttttgaaacagtctttttgtagtatctgcaagtggatatttggagtgctttgatgcctatggtggaaaaggaaatatcttcacataaaaactagacagaagcattctcagaaacttctttgtgatgtgtgcattcaactcacagattggaaagtttgttttgatagagtagttatgaaacacttcttttgtagaatctgttattggatatttggagatttttgaggctttcgttggaaacgggaatatcttcacataaaaactagacagaagcattctcagaaagttctatatgatgtgtgcattgcactcacagagttgaaacttcagtttgatagtgcagttttgaaacagtctttttgtagaatttgaaagtgttcatttggagcgctttgtggcctatggtggaaaaggaaatatcttcatataaaaactagacagaagcattgtcagaaacttctttgcgatatgtgcattcaacttacagagttgaacgtttcttttgatagagcagttttgaaaccctccttttgtagtatctgattgtggatatttagaactctttgaggccttcgttggaaacggtatatcttcacttaaaaactagaccaaagcattctcagaaacatctttgtgatgtgtgcattcaactcacagggttgaaactttcttttgatacagcagtttgaaacactcattttgtagaatccacttgtggatatttggagctctttgaggccttcgttggaattgggataactttacataaaaactagacagaagcattctcagaaactgctttttgatgtgtacattcaacacacagagttgaacctttcttttgatagagcagttttgaaagagtctttttgtagaatcagcaagtggatatttggagtgatttgaggcctgtggtggaaaaggaaataccttcctaaaaaaactagacagaagcattctcagaaagttctttgtgatgtatgcgttcaactccagagttgaaccattcttttgatagagctgttttgaaacactctttttgtagaatctgaaagtgttcatttggagcgctttgaggcctatggtggaaaagggaatatctacatatgaaaagtagacacaagcattctcagaaacttctttttgatgtgtgctttcaacccacagagttgaactttgcttttgagagagaagtttgaaacagtctttctgtagaatctgcaagtggatatttggagcgatttgaggccttcatttgaaacgggatatcttcacttaaaaactagaatgaagcattctcagaaacttctttgtgacgtgtgcattcaattcacagagttgaacctttcttttgatagagcagttttgaaacactccttttatagaatctgcttgtggatatttggagttctttgagaatttcgttggaaacgggatatcttcacataaaaactagagagaagcattctcagaaactgctgtgtgttgtgtgcattcaactcacacagttgaacctttcttttgatagagcagtttgaaacagtctttttgtagaatctgcaagtgctcatttggagcgctttgaggcctatggtggaaaaggaattatcttcacataaaaactagaaagaagcattcacagaaacttctttgagatgtgtgcattcagctcacagagctgaaccttccttttgatgaagcagtttccaaacagtctttttgtagaatctgcaagtggatatttggagtgatatgcggcctatggtggaaaaggaaatatcttcacataaaaactagtcagaagcattctgaggaacttctttgtgatgtgtgcattcaactagtaaagctgaacctttatattgatagagcagttttgaaacactccttttgtaatatctggtagtggatatttggagatttttgaggccaacggtggaaaaggaaatatcttcacataaaaagtagacaggagcattctgagaaagttctttgtgatgcctgcattcaattcacagagttgaaactttcttttgatagagcagttttgaaacactctttttgtagaatctgcaagagttcatttggagcgctttgagggctatggtggaaaaggaaatatcttcacatacaaactagacagaagcattctcagaaacttctttgtgatgtgtgcactcaactcacagagttgagccttctttttgatagagcagttttgaaacagtctttttctagattctgcaggtggatatttggagcgatttgaggtctgtggtggaaaaggtaataacttcacattaaaattagagagaagtattctcataaactgctttatgatgtgtgcattcaactcacagcgttgaacctttcttttgttagcgcagttttgaaacctctttttgtagaatctgcaggtcttcatatggagtgctttgaggtctatggtggaaaatgaaataacttcacataaaaactagacagaagcattctcagaaacttcttagtgatgtgcacattcaactcacagagttgaaccctccctttgatagagcagttttgaaacactccttttgtagaaacagcttgtggatatttggagctccttgaggccttcgtttgaaaagggatatcttaaaataaaaacgagacagaaccattctcagaaacttctttgtgttgtgtgccttcaagtaacacagttgaacctttcttttgatagagcagttttgaaacactccttttgtagagtctgctagtggatatttggcgattttgaggccttcgttggaaacgggagtatcttcacataaaaactagacagaagcattctcagaaaacgcttcgtgatgtgtgcattcaactcacagagttgaacctttcttttgatagagcagctttgaaacacgcattttgtagaatctgcaagtgttcatttggagggctttgaggcctatcctgaaaaaggatgtgtcttcacataaaaactagacagaagcattctcagaaacttctttctgatgtgtgcattcaacacacagagttgaaccttccttttgagggaacaattttgaaacactgtttgtagaatatggaagtggatgtttggagcaatttgaggcctatggtgaaaaaggaagaatcttcacataaaatctacccagaagcattctcagaaacttccttgggatgtgtgcattcacctaacacagtagaacctttctttagatagagcagttttggaacactctttttgtagaatctgcaagttgatatttggagcactttgaggcctatggtgaaaaaggaagttatcttcacataaaaactacacagaagcattccaagaaacttctttgtgatgtttgcattcaagtcagagagttgaaccattcttttgatagagcagttttcaaacactatttttgtagaatctgcaagtggacatatggagcactttgaggcctgtggtgataaaggaaatatcttcacatagaaactacaaagaagcattctcacaaacttctttgtgatgtgtgcattcaactcatagagttgaacatttcttttcaaagagcagttatgaaacacactttttggagaatctgcaagtggaaatttggagggctttgaggcctggggtgaaaaaggaaatatcttcccataaaaactacacagaagcattctcagaaacttctttgtgatgattgctttcaactcacacagttaaacattacttttcatagagcagttttgaaacacaatttttgcagaattttcaagtggatatttggaccgctttggggccttcgttggaagtgggatatcttcacataaaaagtagacagaagcattctcagaaacttctttgtgatgtgggcattcaactcacatagttgaacctttcttttgatagagcagtttagaaacactcctttagtagaatctgtaagtggacattcggagcgctatgaggcatatggtgaaaatggaaatatcttcacataaaaactagacagaagcattctcagaaacttctttgtgatgtgcgcattcaactcacagagttgaacctttcttttgatagagcagttttgaaacactcattttgtagaatctgcaaggggacatttgaagcgctttgaagactaaggtgaaaaaagaaatatcttcacataaaaactacacagaagcattctcagaaacttctttgtgatgtttgctttcacctcacagagtttaacattccttttcatagagcagttttgaaacactctttttctagaatttgcaagtagatatttggaccgaaatgagaccttcattggaaaagggatatcttcacaaaaattagacaaaagcattcccagaaatttctttgtgatgtgtgcattcaactcacagaattgtacctttctttttatagagcagttttgaaacacccttttgtagaatctgcaagtggacatttgtagtgcttttaggcctgtggtgaagaaggaaatttcttcacaaaaaactagacagaagaattctcagaaacttcattgtgatgtgtgcattcaactcacagaattgaacctttcttttcatagagcagtaatgaaacactactgtagaatctgcaagtggacatttggagtgctttgaggcctgtggtgaaaaaggaaatatgttcatataatactacccagaatcattctcagaaacttctttgtgatgtttgctttcaactcacagagttgaacattcgttttcatagagcagttttgaaacactctttttgtagaatttgcaagtggatatttggaacgctttgaggccttctttggaaacctgatatcttcacaaaaactacacagaagcattctcagaaacttctttgtgatatgtgcactcgacttacagagttgaaccgttcttttgatagaggagtttagaaacacactttttatagaatctgcacgtggacatttggagcgctttgaggcctgtggagaaaaaggaaatatcttcacataaaaactacacagaggcattctcagaaacttctttgtgatgtttgctttccactcacagagttgaacattccttttcctagagcagttttgaaacatccttttagtagaatttgcaagtggatatttggaacgctttgaggccttctttggaaatggaatatcatcacaaaaacaagacagaagaattcccagaaacttctttgtgatgtgtgcattcaactctttttttctatagaacagtttagaaacactctttttgtggcatctgtaactggacttttggagtgctttgaggcctcaagtgaaaaaggaaatatcttcacataaaagctagacagaagcattctcagaaacttctttgtgatgtttgcattcaactctcagagttgaatattccttttcatagagcagttttgaaacacactttttgtagaatctgcaagtggacatttggagcgcttggaagactatggtgaaaaaggaaatatcttcacataaaaactacacagaagcattctcagaaacttcttctgatgtgtgcactcaagtcgcagaggtgaacctttcttttgatagaacagttttgaaactctctttttatggaatctgcaagtggacatttggagtgctttttggccttcgttggaaactggaatatcttcacataaacactagacagaagcattctcagaaacatctttgtgatgtgtgcattaaacttacagatttgaacattccttttcatagagcagttttgaaacactctttttctagtatgtgccagtggacatttggagcgctttgaggcctatgttgaaaaaggaaatatcttcacataaaaactagacagaagcgttctcagaaactaccttgtgatgtgtgtactcatctcacagagctgaacatttcttttgatagagcaattttgaaacactctttttgtagaatctacaactggacatttggagcgctttgaggcctatggtgaaaaaggaaatatcttcacataaaaactacacagaagcattctcagaaacttctttgtgttgtttgctttcaactcacagagttgaacattcgttttcatagagcagttttgaaacactctttttgtagtatttgcaagaggatatttggaccgcttttgggccttcgttggaaatgggatatcttcacaaaaactagacagaagcattctcagaaacttctttgtgatgtgtgcatccaactttttcttttgatagagcacttttgaaactctctttttgtagaatctgcaagtggacatttggagctctatgaggtctacagtgaaaaggaaatatcttcacataaaaacttcacagaagcattttcagaaacttctttgtgttgtgtgcactcaactcacagaattgaacctttcttttgttagagcagttttgaaacactcttttaggagaatctgcaagtggacatttggagcgctttgaggtctgtggtgaaaaaggaaatatcttcacataaaactagacagaagcatgctcacaaacttctttgtgatgtgtgcattccactcacagagttgaacctttcttttgatagagcagttttgaaacactctttttgtagcatctgcaagtgttcatttggagcgctttgaggcctagtgtggaaaaagaaatatcttcacataaaaacttgacagaagtattctcaggaacttctttgtgacgtgtgcattcaactaacagagttgaacctttcttttgatagagcagttttgaagcactccttttgcagggtctgctagtggatatttggagatttttcaggcctttgttggaaacaggaatatcttcacataaaaactagacagaagcattctctgaaagtactttgtgatgtatgcattcaactcacagtatcgaacctttctttttatagagcagttttgaaacactccttttgtaggatctgctagtgtatatttggatcccttttaggcctttgttggaaacgggaatttcttcacataaaaactagacacaagcattctcagcaactgctttgtgatgtgtgcattcaactcacatagttgtaactttctttggatagagcagttttgaaagactctttttgtaggatctgcaagaggacatttgaatctctttgaggcctatggtgaaaaaggaaatgtcttcacaggaaaacttcacagaagcattctcagaaacatctttgtgatgtgtgcattcaactcacagagttgaacttttcttttaatagagcagttttggaaaacactttttgtagaaactgcatgtggacatttgtagcgctttgaggcctatgatgaaaaaggaaatatcttcacatataaacgagagagaagcattctcagaaacgtctttatgatgtctgtgttcaactcacagagttaaacctttgtggtcatagaggagctttgaaacactctttttgtagaatcttcaagtggacatttggagcgcttcgagcctgtggtgaaaaaggaaatatcttcacataaacactacacagaagcattttcagaaacttctttgtgaagtttgctttcacctcacagagttgaacattccttttcatggcgcaggtttgaaacactctttttgtagaatttgcaagtggatatttggatggctctgaggccattgttgggaaaagaaatatcttcaaataaaaactagacagaagcattctcagaaacttctttgtgatgtgtgcattcaactcacagagttgaacggttcttttgatggagcagttttgaaacattctatttgcagaatctgcaagtggacatttagagtgctttgaggcctatggtgaaaaaggaagtatcttaacatagaaactacacggaagcattctgagaatcttctttgtgatgtgtgcattcaattcacagaattgaaccgttcttttgatagagctgtgttgaaacactcttttcgtagaatctgcaagtggacatttggagcgttttgagacttatggtgaaaaaggagccatcttcacataaaaactacacagaagcattatcagaaacttctttgtgatgtatgcattcaactcacagagttgaacctttcttttgatagagcagttttgaaacactcctttgtagaatctgcatgtggacagttggagcgctctgaggcctgtggtgaaaaaggaagtatcttcacatagaaactacacagaagctttctctgaaactcctttgtgatgtgtgcactcaattcacagagttgaacctttcttttggtagagcagttttgaaacactctttttgtagagtctgcaagtggacatttggagtgctttgaggcctatggagaaaaaggaaatatcttcaaataaaaactacacagaagcattctcaggaacttgtttgtgttgtttgatttcaacgcacagagttgaacattccttttcatagagcagttttgaaaccctctttttgtagaattagcaagtggatatttctaccgctttgaggaattcattggaaaaggaatatcttcacaaaaactagacaaaagcattcccagaaactactttgtgatgtgtgcattccactcacagagttgaaactttcttttgatagagcagttttgaaacactctttttgcagaatctggaagtggacatttgtagcgctttgaggcctatggtgaaaaaggaaatatcctcacataaaaactatacagaagcattctcagaaacttctttgtgatgtgtgcattcaactcacagagttgaacatttctttgatagagcagttttgaaacaatctttttatagggtatgcaactggatatttggagggctgtgaggcctatggtgaaaatggaaatatcttcacataaaaactacacagtagcattccaataaacttcttttgttgtttgctttcaactcacagagttgaatattccttttcatagagcagttttgaaacactgtttttcagaatttgcaagtggatatttggactgctgtgaggccttcgttggaaacgggatatcttcacataaaaagtagacagaagcaatctcagaaacttctttgtgactttcatgtcacagagttgaacattccttttcatagaacaattttgaaacactctttttgtagaatttgcaagtggatatttggaccgctttgaggccttcgttggaaacggtatatcttcatataaactacacagaagtactcccagaaacttctttgtgaggtgtgctttcaactcacatagttgaacctttcttttgatagagcagttttgaaacactctttttgtagaatctgcaagtggacctttggaccactttgcggccttatttggataaagggtatcttcacgtataaaccagacagaagcattctcaaaaacatctttatgatgtctgggttaaactcacagagttaaacctctgttttcatagagcagctttgaaacacactatttgtggaatctgcaaatggacatttggagcgcttctaggcctgtggtgaaaaaggaaatatcttcacataaaaaatacacagaagcattttcagaaacttctttgtgatgtgtgcattcaactcacaaagttgaacattccttttcatagagcagttttgaaacacactttttgcagaatctgcaagtgaatatttcgagccctttgtggcttatactgaaaaacgaagtatcttaacataaaaactacacagcagcattctcagaaacttccttgtgatgtgtgcattcaactcacagagttgaacctttcttttgatagagcacttttgaaacactctttttgtagaatctgcaagtggacatttggagcgctttgaaacctatggtgaaaaaagaaacaacttcacataaaaactacaccgaagcattctcagaaacttctttgtgatgtgtgcattcaactcacagagttgaacctttcttttggtagagcagttttgaaacactgttttggtagaatctgcatgtgtggacagttggagctcctttatgcctgtggtgaaaaaggaaatatcttcacataaaaacggacagatgcattctcagaaacttaattgtgatgtgtgcattcaactcacagggttgaacctttcttttgataaaacagttttgaaacacagtttttatagaatctgaaagtgaacattggagccctttgtggcctatggtgaaaaaggacatatctttacctgagaaccacacagaagcattctcagaaacttctttgtggtgtttgcattcacctcgttcttttgatggagcagttttgaaacactcattttgtagtatctgcaagtgaacatttagagcgctttgtagcctatggtgaaaaaggaaatatcttcacataaaaactacacagaagcattctcagaaacttctttgtgatgtgtgcattcaactcacagagtagaacctttcttttgatagagcagatttgaaacactctttttatagaatatgtaagagaacatctggagcgctttgagtcctctggtgaaaaaggaagtaactttacataaaaactagacagaagcattcccagaaacttatttgtgatgtgtgcattcaactcacagagttgaaactttcttttattagagcagttttgaaacacgctttttgtagaatcttcaagtggatattcggagcgctttgaagcctgtggtgaaaaaggaaatatcttcacataaaaactagacagaagcattctcaaaaacttctttgtgatgtgtgcattcaactcacagaattgaacttttctttaggtagagcagttatgaaacagtctttttctaggatctgcaactggacatttagagggttttgaggcctatggtgaaaaaggaaatattttcacataaaaaatacacagaagcattctcagcagcttctttgtgttgtttgccttcaactcacagagttgaagattacttttcatggaggagttttgaaacaatctttttgtagtatttgcaagtggatacttggaatgctttgaggccttcgttggaaaggggatatcttcacaaaaactagacagaagcattcccagaatcttctttgtgatgtgtgcattcaatgcacagtgttgaacctttcttttgataaagcagttttgaaactctctttttgtagaatctccaagtggacattttgagcgctttgtggcctctgttgaaaaaggaaatatcttcacattaaaacttgacagaagcattctcagaaacctctttgtgttgtgtgcattcaactcacagatttgaacctttcttttgatagagcagtttgaaacagtctttttgtaggatctgaaagtggacatttggagcgttttgaagcctgtggtttaaaaggaaatatcttgatgtctaaaacgccaaaagtaatggcaacaaaagccaaaattgacaaatggcatctaataaaactaaagagcttctgctcagcaaaagaaactaccatcagagtgaacaggcaacctacaaattgggagaaaattttcacaacctactcatctgacaatgggctaatatccagaatctacaatgaactcaaacaaatttacaagaaaaaaagaaacaaccccatcagaaagtgggcaaagacctgaacagacacttctcaaaagaagatatttatgcagccaaaaatcaaatgaaaaagtgctcaccatcactggcgatcagagaaatgcaaatcaaaatcacaatgagataccatttcacaccatttagaatggcaatcattaaaaagtcaggaaacaacaggtgctggagaggatgtggagaaataggaacacttttacactattggtgggactgtaaactaattcaaccattgtggcagtctgtgtggcgattcgtcagggatctagaactagaaataccaattgacccagccatcccaatactgggtatataaccaaaggactataaatcatgctgctataaagacacatgtacacgtatgtttattgtggcattattcacggtagcaaggacttggtacctacccaaaggtccaacaacgacagactggattaagaaaatgtggtagatatacaccatggaatactatgcagccataaaaaatgatgagttcatgtcctttgtaggaacatggatgaaaatggaaatcatcattctcagtaaattgtcacaagaacaaaaaactaaaaaccgtacattctcactcataggtgggaatagaacaatgagaaaacatggacacaggaaggggaacatcacactctggggactgtggtggggtggggggaggggagagggactgcattgagagatatacctaatgcttgatgaagagttagtgggtgctgcacaccagcatgccacatgtatacacatgtaactaagctgcacattgtgcacttgtaccctaaaacctaaagtataataataataaataaataaataagtagaataaaaagaaaaaaaagaaaaaggaaatttcttcacataaaaactagacagaagcattctcagaaacttcttagtgatgtttgctttccactcacagagttgaacattccttttcatagatcagttttgaaacactctttttgaagaatttccaagtggatatttggacagccttgaggccttgtttggaaacgggatatcttcacaaaaacaacacagaagcattctcagaaacttctttgtgatgcgtgcattcaactcacagagttgaacctttcttttgatagagcagtttagaaacactcctttagtagaatctgcaagtggacatttggagtgctttgaggcctatggtgaaaatggaaatatcttcacataaaaactagacagaagcattctcagaaacttctttgtgatgtgcgcattcaactcacagagttgaacctttctcttgatagagcagttttgaaacactctttttgtagaatctgtaaggggacatttgagcgctttgaagactatggtgaaaaaagaaatatcttcacataaaaactacacagaagcattctcagaaaattctttgtgatatttgctttcacctcacagagtttaactttccttttcatagagcagttttgaaaaactctttttgtagaatttgcaagtggatatttggaccgatatgaggccttcgttggaaacgggatatcttcacaaaaactagacaaaagcatttccagaaatttctttgtgatgtgtgcattcaactcacagaattgtacctttctttttatagagcagatttgaaacactctttttgtagaatctgcaagtggacatttgtagcgcttttaggcctatggtgaaaaaggaaatgtcttcacaaaaaactagacagaagaattctcagaaacttcattgtgatgtgtgcattcaactcacagagttgaacctctcttttcatagagcagtaatggaacactcttgtagaatctgcaagtggacctttggagcgctttgaggcctgtggtgaaaaagaaaatatgttcatataatactacacagaatcattctcagaaacttctttgagatgtttgctttcaactcacagagtagaacattccttttcatagagcagttttgaaacactctttttgtagaatttgcaagtggatatttggaacgctttgaggccttctttggaaatctgatatcttcacaaaaactggacagaagcattctcagaaaattctttgcgatatgtgaactcaacttacagagttgaaccgttcttttgatagaggagcttagaaacactctttttatggaatatgcaagtggacatttggagcgctttgaggcccatggagaaaaaggaaatatcttcacataaaaactacaaagaagcattctcagaaacttctttgagatgtttgctttccactcacagagttgaacattccttttcatagagcagttttgaaacaaccttttagtagaatttgcaagtggatatttggaacactttgaggccttctttggaaacgggatatcttcacaaaaactagacaaaagaattcccagaaacttctttgtgatttgtgcattcaactctttttttttatagagcagtttagaaacactctttttgtggcatctgcaactggattttggagtgctttgaggcctaaagtgaaaaaggaaatatctttacctaaaagctagacagaagcattctcagaaacttctttgtgatgtgtgcattcaactctcagagttgaatattacttttcatagagcagttttgaaacactctttttgtagaatctgcaagaggacatttggagcacttggaggcctatggtgaaaaaggaaatatcttcacataaaaactagacagaagcattctcagaaacttctttatgatgtgtgcactcaactcgcagaggtgaacctttcttttgatagaacagttttgaaactctttttttatggaatctgcaagtggacatttgaagagctttgtggccttcgttggaaactggaatatcttcacataaaaactagacagaagcattctcagaaacatctttgtgatgtatgcattcaactcacagagttgaacattccttttcatagagcagttttgaaacactttttttttttagtatgtgccagtggacatttggagcgctctgaggcctttgttgaaaaaagaaatatcttcacataaaaactagacagaagcattctcagaaacttctttttgatgtgtgtacccacctcacagagttgaacatttcttttgattgagaagttttgaaacactctttttgtagaatctacaactggacatttggagtgctttgaggcctatggtgaaaaaggaaatatcttcacataaaaactacccagaagcattctcagaaacttctttgtgttgtttgctttcaactcacagagttgaacattccttttcatagagcagttttgaaacactctttttgtagaatttgcaagaggatatttggatcgcttttaggccttcattggaaactagacaaaagcattctcttcacaaaaactagacagaagcattctcagaaacttctttgtgatgtgtgcattcaactttttcttttgatagagcacttttaaaactctctttttgtagaatttgcaagtggacatttagatctctctgaggtctacggtgaaaaaggaaatatcttcacataaaaacttcacagaagcattttcagaaacttctttggatgtgtgcattcaactcacagagttgaacctttcttttgttagagcagttttgaaacactctttttggacaatccgcaagtggacatttggagcgctttgaagcctgtggtgaaaaagcaaatatctttacataaaactagacagaagcttgctcacaaacttctttgtgatgcgtgcattccactcacagagttgaaactttcttttgatagagcagttttgaaaaactctttttgtagcatctgtaattgttcatttggagcgctttgaggcctactgtggaagaagaaatatcttcacataaaaacttgacagaatcattctcagaaacttctttgtgatgtgtgcattcaactcacggagttaaactttccttttgagagagcagatttgaaacactctttttgtagtatctgcatgtgtatatttgagcgatttgaggcttatggtgataaagggaatatcctcacataaaaactaaacagaaacattcacaggaactttttgtgatgtgtgcattcaactaacagagttgaagctttcttttgatagagcagttttgaagcactccttttgcagaatctgctagtagatatttggagatttttcaggccttcgttggaaacgggaatatcttcacataaaaactatacagaagcattctcagaaagtactttatgatgtgtgaattcaactcacagaatcgaacctttctttcgatagagcagttttgaaacactccttttgtaggatctgctagtggttatttggatttcttttaggactttgttagaaacgggaatttcttcacataaaaactagacagaaacattctcagtaactgctttgtgatgcatgcattcaactcacatagttgaacctttcttttgatagagcagctttgaaacactgtttttgtagaatctgcaagtggacatttgtagcgctttgaggcctatggtgaaaaagcaaatatcttcacatgaaaactggacagaagcattctcagaaacttctttgtgatgtgtgcattgaactcacggagttgaacatttcttttgatagagcagttttgaaacaatctttttgaagtatctgcaactggacatttggagggctttgaggcctatggtgaaaaacgaaatatcttcacataaaaactacacagaagcattctcagaaacatctttgtgttgattgctttcaactaatagagttgaacattcctattcttagagcacttttgaaacactctttttgtagggtttgcaagtggatatttggaccactttgaggcctttgatggaaacgggatatttcacaaaaactagacagaagcattctcagaaacttctttgtgatgtgtgcattcaactcacacggctgaacatttcttttgatatagcagttttgaaacactctttttgtagcatctgcaagtggacatttgtagcgctttgaggcgtatggggaaaaaagaaatatcttcacataaaaacaatacaggagcattctcagaaaattctttgtgatgtgggcattcaactcacagagttgaacctttcttttgaaagagcagttttcatacactctttatgtagaatctgcgtgtggacattttgagcgctttgaggcctgtggtgaagaaggatgtatcttcacataaaaactacaaagaagccttctcagaaaatactttgtgatgtttgctttcaactcacagagttgaacattccttttaatagagcagttgtgaaacactctttttgtgatatttccaagtggatatttggaacactttgaggccttcgttgcaaaagcgatatcttcacaaaaactatacagaagcattctcagaaacttctttgtgatgtatgcactcaactaacccagttgaacctttcttttgatagagcagttttgaaacactctttttgtagaatctgcttatggatatttggagatttttgtagcctaaacgggaatatcttcacataaaaactagacagaagcattctcagaaagttctttgtgatgagtgctttcaactcagagagttgaaccattctttagatagagcagttttgaaacactccacttgtagaatctgcaagtggatatttggatctctctgaggccttcgttggaaacaggaatatcttcacttagaaactagacagaagcattctcagaaactgcctagtgatgtgtgcatgcaacacacagagttggactttagttagagtagttttgaaacactctttttgtagaatctgcaagtggacatttgttgcgctttgaggtctatggtgagaaagcaaatatcttcacataaaaactagaccgaagcattctgagaaacttctttgtgatgtgtgcattcaactcacagagttgatcatttcttttaatagagcagttttgaaacaatatttttgaagtatctgcaaatggacatttgaagagctttgaggcctatggtgaaaaactatatatcttcacataaaaactgcacagaagcattctaagaaacttatttctgttgtttgctttaaactcacagagttgaacattccttttcttagagcacttttgaaacactctttttgtagaatttgcaagtggatattttggaacattttgaggccttcgttgcaaacgggatatcttcccaaaaactagacagaagcattctcagaaactactttgtcatgtgtgcactcaactcacccagttgaacctttcttctgatagagcagttttgaaatacactttttgtagaatctgcaaatggacatttggagcgctttgaagccaatggtgaaaaaggaattctcttcacataagaactacacagaagcattctcagaaacttgtttgtgacgtttgctatcaactcacacagttgaacattccttttcatacagcagttttgaaacactctttttgtagaatttgcaagtggatatttggaacactttgaggccttcattgcaaacgggatatcttcacaaaaactagaaagaagcattctcagaaacttctttgtgatgtgtgcattcaactcacagtgttgagccgttcttttgttagagcagttttgaaacacgctttttgtagaatcttcaagttgccatttggaacgcgtagaggcttgtgttggaaaaggaaatatcttcagatgaaactacacagaagcattctcagaaacatctttggatatttgctttcaacacatagaattgaacattcgttttcttagagcagttttgaaacactcttatgtaaaatttccaagtgaatatttggaccgctttgaggtcttcattggaaatggtatatcttcacaaaaaatagacagcagcattcacagaaacttcttggtgatgagcattcaactcacagagttgaaacgttcttttgatagaacagttttgaaacagtctttttgtagaatcagcaagtggaaatttggagggctttgaggtctaatgtggaagaggaaatatcttcacataaaaactccatagaagaattctcagaaacccctctgtgatgtctgcattcatctcaaagtgttgaacctttcttttgatagagcagttttgaaagacactttttgtagaatctgcacgtggacatttgaagctttgaggcctaaggggaaaaaggaaatatcttcacataaaaactacaccgaagtattctcagaaacttctttgtggtgtttgctttcaactcactgatttgaacattccttttcatacagcagttttgaaacactctttttgaaagatctgcaagtggacatttggagcgctttgaggcctatggtgaaaaaggaaatatcttcacatacaaactacacagaagcattgtcagaaatttatttctgatatgtgcattcaacatacagagttgaacccttcttttgatagagcagttttgaaacactctttttgtagtatctgcaagtagacatttggagagccttgtgtcctatagtgaaaaagtcaatgtcttcacgtaaaaactagacaaaagcatgctcggaaacttctttttgatgtctgcattcaactcacagagttgtactgttctctcgatagagcagttttgaaacactctttttgtagaatatgcaagtggaaatttagagctctttgaggcctacggtgaagaaggaaatattttcacataaaaacttcacagaaggattctcagaaacttctttgtgatgtgtgcattcaactcacagagttgaacgtttctctttatagagcagttttgcaacactctttttgtagaatctgcaagtggacatttggatcgctttgaggcctttggtgaaaaatgaaatatcttcacataaaaactacaaagaagcattctcagaaacatctttgtgttgtttgctttcaactcacagatttgacattccttttcatagagcagttttgagacattctttttgtagaatttgcaagtgtatatttggactgctttgaggtatttgttggaaaagggatatcttcaaaaaactagacagaagcattatcagaatcttctttgtgatgcatgcattcaactcacagagatgaacgttcttttgatagagaagttttgaaaaactctttttgtagaatctgcaagtggacatttggagtgctatgaggcctaaattgaaaaaagaaatatcacataaaaactacacagcagcattctcagaaacttctttgtgttgtttgctttcaactgacagatttgaacattccttttcatagagtagttttgaaatactctttctgtagaatttgcaagtggatattaggacagctttaaggccttcgttggaaacggaatatcttcaaaaaactagacggaagcattctcagaaacttctttgtgatgtgtgcattcaactcacagagttgaaccattcttttgacagaacagttttgaaacactctttttgtggaatctgcaagtggacatttggagcgctatgaggactaaattgaaaaaggaaatatcttcacatagaaactacacagaagcattctcagaaacctgtttgtgttgtgtgcattcaacccacggagttgaacattccttttcatagatcagttttgcaacactctctttgtagaattcgcaagtggatatttggaccactttgaggccttcgatggaaacgggatgttttcacataaaaagtagacagaagcattctcagaaacttctttgtgatgtgtgcattcatcttatggagttgaaccgttcttttgatggagcagatttgaaacactctttttgtagaatttgcaagtgtatatttcgaccgctttgcggccttcattggaaacggaatgtcttcacaaaaactagatggaagcattctcagaaacttctttgtgatgtgtgcattcaactcacagagttgaaccgttcttttgatagaacagttttgaaacactctttttgtggaatctgcaagtggccattgggaacgctttgaggtctgtggtggaaaaggaaatatcttcacgtgaaactacacagaagaattctcagaaacttctttggatgtttgttttcaactaacagaattcaacattctttttcattgagcagttttgaaacactcttatgtagaatttgcaagtagatatttggactgctttgaggccttcgttggaaacgggatatcttcacaaaaactagacaaaaggagtctcagaaacaacattgtcatgtgagcattcaactcacagaattgaactactcttttgatagagcagtttttaacactctttttgtagaaccagcaactggacatttggagcactaagaggcctaaggttaaaatggaaatatcttcacataaaaactacactgaagcattctcagaaacttctttgtgatgcgtgcattcaactcacagagttgaacctttcttttgatagatcagttttgaaacagtctttttgtagaatctgcatgtggacattttgagtgctttgaggcctatggtgaataaggaaatattttcacataaaaactacacagaagcattgtcagaaactactttgtgatgtttgctttcaactcacagagttgaacattcgttttcatagagctgttttgaaactctctttttgcagaatttccaaggggatatttggagcgctttgaggcctgtggtgaaaaaggaaatatcttcacgcaaaaatagaccgaagcattcccagaaacttctttgtgatgtgtgcattcaactcacggagtttaacctttctttggatagatcagttttgaaacaatctttttgtagaatctgcaagtggacaattggggtgctttgaggcctatggtgaagaaggatgtatcttcacagaaaaacttcacggaagaattctcagaaacttctttgtgatggctgcattcaactcacagagttgaaccattcttttgatagagaagttttgaaacacactttttctagaatctgcatgtggacatttggagcgctttgaggcctgtgatgaaaaaggaaatattttcacataaaaattacacagaagcattctcagaaacttctttgtgctgtttgctttcaactcacagagttgaatattccttttcatagagcagttttgaaacactctttttgtagtatttgcaagtggatatttatactgctttgaggccttcgttggaaacgggatatcttcaaaaaactagacagaagcattctcagaaacttctttgtgatgtgtgcattcaacgcacagaagtgaaccgtacttttgatggagcagttttgaaaaactctttttgaaaaatatgcaagtggccatttggaacgctttcaggactttgctggaaaagggaatatcttcagataaaagtacacagaagaattctcagaaacttctttggatgtttgttttcaactcacagaattgaacattccttttcatagagcagttttgaaacacccttatgtagaatttgcaagtggacatttggagcgctttgaggccctcgttggaaacgggagatcttcaccaaaactagacacaagcagtctcagaaactactttgtgatgtgtgcattcaactcacagatttgaaccgttattttgatagagcaattttgaaacactctttttgtagaatctgcaagtggccattgggaacgctttgaggcctgtgatggaaaaggaaatatcttcagatgaaactacacagaataattctcagaatcttctttggattttttttcaaatcacagcattgaacattctttttcatagagcagttttgaaacactcttatgtagaacttgcaagtggatatttggaacgctttgaggccttcgttggaaacgggatatcttcacaaaaactagacagaagcaatctctgaaactactttgtgatgtgtgcattcagagttgaaactttcttttgatagagccgtttagaaacactttttttttttattatactttaagttttagggtacatgtgcacattgtgcaggttagttacttatgtatacatgtgccatgctggtgcgctgcacccactaactcgtcatctagcattaggtatatctcccaatgctatccctcccccctcacccaaccccacaacagtccccagagtgtgatattccccttcctgtgtccatgtgatctcattgttcaattcccacctatgagtgagaatatgcggtgtttggttttttgttcttgcgatagtttactgagaatgatggtttccaatttcatccatgtccctacaaaggacatgaactcatcattttttatggctgcatagtattctatggtgtatatgtgccacattttcttaatccagtctatcattgttggacatttgggttggttccaagtctttgctattgtgaataatgccacaataaacatacatgtgcatgtgtctttatagtagcatgatttatagtcatttgggtatatacccagtaaagggaaggctgggtcaaatggtatttctagttctagatacctgaggaatcgccacactgacttccacaatggttgaactagtttacagtcccaccaacagtgtaaaagtgttcctatttctccacatcctctccagcacctgttgtttcctgactttttaatgattgccattctagctggtgtgagatgatatctcattgtggttttgatttgcatttctctgatggccagtgatgatgagcattttttcatgtgttttttgggtgcataaatgtcttcttttgagaagtgtctgttcatgtccttcgcccactttttgatggggttgtttgtttttttcttgtaaatttgtttgagttcattgtagattctggatattaaccctttgtcagatgagtaggttgcgaaaattttctcccacgttgtaggttgcctgttcactctgatggtagtttctcttgctgtgcagaagctctttagttaaattagatcccatttgtcaattttgtcttttgttgccattgcttttggtgtttgagaggtgaagtccttgcccatgcctatgtcctgaatggtaatgcctaggttttcttctagggtttttatggttttaggtctaacgtttaaatctttaacccatcttgaattgatttttgtataaggtgtaaggaagggatccagtttcagctttctacatatggctagccagttttcccagcaccatttattaaatagggaatcctttccccgttgcttgttttctcaggtttgtcaaagatcagatagttgtaggtatgcggcgttatttctgagggctctgttctgttccattgatctatatctctgttttggtaccagtaccatgctgttttggttactgtagccttgtagtatagtttgaagtcaggtagcatgatgcctccagctttgttcttttagcttaggattgacttggtgatgcgggctcttttttggttccaaatgaactttaaagtagttttttccaattctgtgaagaaagtcattggtagcttgatggatatggcattgaatctgtaaattaccttgggcagtatggccattttcacgatattgattcttcctacccatgagcatggaatgttcttccatttgtttgtatcctcttttatttccttgagcagttgtttgtagttctccttgaagaggtccttcacatcccttgtaagttggattcctggatattttattctctttgaagcaattgtgaatgggagttcactcatgatttggctctctgtttgtctgttgttggtgtataagaatgcttgtgatttttctacattgattttgtatcctgagactttgctgaagttgcttatcagctgaaggagattttgggctgagacgatggggttttttagataaacagtcatgtcgtctgcaaacagggacaatttgacttcctcttttcccaattgaataccctttatttccttctcctgcctgattgccctggccagaacttccaacactgtgttgaataggagtggtgagagagggcttccttgtcttgtgccagttttcaaagggaatgcttccagtttttgcccattcagtatgatattggctgtgggtaactatcctaaatatatatgtacccaatacaggagcacccagattcataaagcaagtcctgagtgacctacaaagagacttagactcccacacattaataatgggagactttaacaccccactgtcaacattagacagatcaatgagacagaaagtcaacaaggatacccaggaagtgaactcagctctgcacgaagcagacctaatagacatctacagaactctccaacccaaatcaacagaatatacatttttttcagcaccacaccacacctattccaaaattgaccacatactgggaagtaaagctctcctcagcaaatgtaaaagaacagaaattataacaaactatctctcagaccacagtgcaatcaaactagaactcaggattaagaatcccactcaaagccgctcaactacatggaaactgaacaacctgctcctgaatgactactgggtacataacgaaatgaaggcagaaataaagatgttctttgaaaccaacgagaacaaagacacaacataccagaatctctgggacgcattcaaaacagtgtgtagacggaaatttatagcactaaatgcccacaagagaaagcaggaaagatccaaaattgacaccctaacatcacaattaaaagaactagaaaagcaagagcaaacacattcaaaagctagcagaaggcaagaaataactaaaatcagagcagaactgaaggaaatagagacacaaaaaacccttcaaaaaatcaatgaatccaggaactggttttttgaaaggatcaacaaaattgatagaccgctagcaagactaataaagaaaaaaagagagaagaatcaaatagacacaataaaaaatgataaaggggatatcaccaccaatcccacagaaatacaaactaccatcagagaatactacaaacacctctacgcaaatgaactagaaaatctagaagaaatggataaattcctcgacacatacactctcccaagactaaaccaggcagaagttgaatctctgaatagaccaataacaggagctgaaattgtggcaataatcaataatttaccaaccaaaaagagtccagaaccagatggattcacagctgaattctaccagaggtacaaggaggaactggtaccattccttctgaaactattccaatcaatagaaaaagagggaatcctccctaactcattttatgaggccagcatcattctgataccaaagccgggcagagacacaaccaaaaaagagaattttagaccaatatccttgatgaacattgatgcaaaaatcctcaataaaatactggcaaaacgaatccagcagcacatcaaaaagcttatccaccatgatcaagtgggcttcattcctgggatgcaaggctggttcaatatacacaaatcaataaatgtaatccagcatataaacagaaccaaagacaaaagccacatgattatctcaattgatgcagaaaaggcctttgacaaaattcaacaacccttaatgctaaaaactctcaataaattaggtattgatgggacgtatttcaaaataataagagctatctagaaacactctttatgtagaatctgcaagtggacatttggagtgttttgagacccatgttgaaaaaggaaatatcttcccataaaaactacacagaagctttctcagaaacttctctgtgatgtttgctttcaactcacacagttgaacatttgttttgatagagcagttttgaaacactctttttgtagaatctgcacgtggacatttggagcactttgaggccagtggagaaaaaggaaatatcctcacacgaaaactacacagaagcattctcagaatcttctttgtgttgtttgctttcaactcacagagttgaacgttccttttcatggagcagttttgaaacaatctttttgtagaatttgcaagtggatatttggactgctttgagaccttcgttgaaacgggatatcttcaaaaagtagacaaaaccattctcagaaacttctttgtgatatttgcattcaatgcacagtggtgaaccattcttttgatacagcatttttgaaacactctttttgtagaatctggaagtggccatttggaacgctttgaggcttgtcttttgaaaaggaaatatcttcagataaaactacacagaagaattctcagaaacttctttggatgtttgttttcaactgacagaattgaacattccttttcatagagcagttttcaaacactcttatgtggaatttgcaacttgatatttggacagctttgaggctctccttggaaatgggatatcttcacaaaaactagatacaagcagtctcagacactactttacgatgtgtgcattcaactcacagatttgaacggttcttttgatagagaaattttgaaacacactttttgtagaatcagcaagtggacatttggagcgctttgaggcatctggtgaaacaggaaatatcttcacaaaaatagacagtagcattctcagaaacttctttgtgatgtgtgcattcaactcccagaatttaacccttctttggatagagcagttttgaaacaatcgttttctagaatctgcaagtggacaactggagcgctttgaggcctatggtgaaaaaggatatatgttcacataaaaacttcatggaaccattctcaaaaacttctttgtgatgtgtgcattcaactcacagagttgaaccgttcttttgatagagcagttttgaaacactctttttgtagaatctgcatgtggatatttggagcgctttgaggactgtggtggaaaaggaaatattttcacataaaaattacactgaagcattctcagaaacttctttgggttgtttgctttcaactctcagagttgaatattccttttcagagagaagttttgaaacactgtttttgtagaatttgcaagtggatatttgtaccgctttgaggccttcgttggaaacgggatatcttcacaaaaactagacagaagcattctcagaatcttctttttgatgtgtacattcaactcacagggttgaacctttcttttgatagagcagttttgaaacacactttttgtagtatctgcaagtggacaattggagctcttctgggcctttggtgaaaaagaacgtatcttcacagaaaaactacacagaggcattctcagaaactactttgtgatgtgtgcattcaactcacagagttgaacctttcttttgatggattagttttgaaacactccttttgtagaatctgaaagtgggcatttggagcgatttgaggcctatggtaaaaaggaaatatcttcacatacaaactagacagaagcattctcagaaacttctttgtgatgtgtgcattcaactcacagagttgaacgtttcttttgatagagcagttgtgaaacattctttttttaggatctgcttgtggacatttggagcgctttgaggcctatgttgaataaggaaatatcttcgcataaaaactacacagaagcattctcagaaactactttgtgatgtttgctttcaactcacagagttgaacattccttttcatagagccgttttgaaactctctttttgcagaatttgcaagtggatacttgtaacgctttgagtactgtggtgaaaaaggaaatatcttcacatgaaaagtagacagaagcattctcagaaacttctttgtgatgtgttcattcaaatcgcagagttgaacctttcttttgatagagcagttttgaaacagtctttttgtagaatctgcatgtggacatttggagcgctttggggcctatggtgaataaggaaatatcttcacataaaaactatgcagaagcattctcagaaaatactttgtgatatttgctttcaactcatggagttgaacatttcttttcatagagccgttttgaaactgtctttttgtggaatttgcaagtggatatttggagcgctttgaggcctgtggtgaaaaagtaaatatgttcacataaaaatagacagaagcattctcagaaacttctttgtgatgtgcgcattcaactcacagtgtttaacctttctttgtacagagcagttttgaaacaatgtttttgtagaatctgcaagtggacatttggggcgctttggggcctatggtgaaaaaggatatatattcacataaaaacttcatggaagcattctcagaaacttctttgtgatgtgtgcattcaactcacagagttgaaccattcttttgatagagcagttttgaaacactctttttgtagaatctgcatgtggacatttggagcgctttgaggcctgttgttaaaaagggaatattttcacataaaaattacacagaagcattctcagaaacttctttgtgttgtttgttttcaactctcagagttgagtattccctttcatagagaagttttgaaacactctttttgtagaatttgcaagtggatatttgtactgctttgaggccttcattggaagtgggatatcttcacaaaaaccagacagaagcattctcagaaacttctttgtgatgtgtacattcaactcacagggttgaacatttcttttgatagagcagttttgaaacactctttttgtagaatatgtaaatggaaattggagctcgtttggacctatggtgaaaaaggaagaatcttcacataaaaactacacagaagcattctcagaaacttctttgtgatgtgtgcattgaactcacagagttgaaccttacttttgatagagcagttttcaaacactctttctctagaatctgcatgtggacatttggagcgctttgaggcatgtggtgaaaaaggacatattttcacataaaaattacacagaagcattctcagaaacttctttgtgttgtttgctttcaactctcagagttgaatattccttttcatagagaaattttgaaacactctttttgtagaatttgaaagtggatatttctaccgcttcgaggcctttgttggaaacggaatatcttcacaaaaactagacagaagcattctcagaaacttctttgtgatgtgtaaattcaactcacagggtggaacatttctcttgatagagcagttttgaatcgcactttttgtaggatctgcaagtggacaattggaactctattgggcctatggtgaaaaggaagtatcttcacataaaaactacacagaagcattctcagaaacttctttgtgatgtgtgcattcaactcacagagttgaacatttcttttgatagagcagttttgaaacactccttttgtagaatctgcaagtggacatttggagcgctttgagacctgtggagaaaaaggaaatatcttcccataaaaactaaacagaagctctctcagaaactactctgtgatgtttgctttgaactcacagaggtgaacctgtcttttgatacaggagttttgaaacactttttttttagaatcagcaaatgaacttttggaacgctttgaggcctatggtgaaaaggaaatatcttcacataaaaacgacacagaagaattctcagaaacttctttatgatgttttctttcaacacacagagttaaatattccttttaatagagcaatttggaaacactctttttgtagaatttgcaagtggatatttggacctctttgaggccttctttggcaacgttatatcttcacaaaaactagacggaagcattctcagaaacttctttgtgatatttgcattcaaatcacagagttgaacctttcttttgaaagagcagtttagaaacactttttatgtagtatctgcaagtgtacatttggagcgctttgaagcctatggtgaaaaaggaaatatcttcctgtaaaaactacacagaagatttctcagaaatctctttgtgatgtttgctttcaacccacagagttgaatctttctcttgatacagcagttttgaaacactccttttgtagaaattgcatgtggacatttggagcaccttgaggcctgtggagaaaatggaaatatctacacacgaaatctgcacagaagcattttcagaaacaactttgtgttgtttgctttcaactcagagttgaacattccttttcatagagcagttttgtaacactcttatgtagaatttgcaagtggacatttggacctctttgaggccctcgttgggaacgagatatcttcacaaaaactagacacaagcagtctcagaaacttcttagtgatgtgtgcattcaactcacaatgttgaacaattcttttgatagagcagttttgaaacactctttttgtagaatctgcatgtggacatttggagcactttgaggcctgtgatgaaaaaggaaatattttcacataaaaactacacagaagcattcttagaaacttctttgtgttgtttgctttcaactcccagagttgaatatttcttttcatggagaaggtttgaaacattctttttgtagaatttgcaagtggatattttgatcgcttagagcccttctttggaaatgggatatcttcacaaaaactagacagaagaattctcagaaacttctttgtgatgtgtacattcaactcatagagttgaacctttcttttgagaatgctgttttgaaacactctttttgtactatctattggaaacaggatatcttaaccgaaactagacagaagcattctcagaaacttctttgtgaagtgtgtattcaactcacagagttgaaccgatcttttgaccaagcagtttagaaacactctttttgtagtatctgcaagtggacatttggtgctctttgaggcctatggtgaaaaaggatatatcttcacttgaaaactagacagaagcattctcagaaacttccttgtgatgtgggcattcaactcacagagttgaaccactctttggatagagcagttttgaaacactctgtttgtggaatctgcaaggggacatttggagtgttttgaggcctatggtgaaaaaggaaatatcttcacataaaaactacacagaagcaatctctaaaacttgtttgtgatgtgtgcattcaactcacagagttgaacattccttttcatagagccgttttgaaacacactttttgtggaatctgcaagtcgacatttggagcactttgaggcctgaaatgaaaaaggaaatatcttcacataaaaactacacggaagcattctaagaaacttctttgtgatgtttcctttcaacccacagagttgaacattctttttcatagagcagtttggaaaccctctttttgtataatttgcaagtggatatttcgacagctttgaggccttcattggaaatcgggatatcttcacaaaactagacagaagcattatcagaaactaccttgtgatgtgttcactcaactcacagagttgaacggttgttttgatgaagcagttttgaaacactctttttgtaggatctgcaagtggacatttggagcactttgaggcctgtggtgaagaaggaaatatcttcacataaaaactacacagaagcattctcagaaactgctttgtgatgtttgctttcaactcacagagttgaacattccttttcttagagcagttttgaaacactctttttatagaatttgcaagtggatatttggaccgctttgaggcattcgttggatacgggatatcttcacataaaaactagagagaagcattcccagaaacttctttgtgatgtgtgcgttcacttctcagagttgaacttttcttttgatagaacagttttgaaacactctttttgaagaatctgcaaatggacatttggagcgcttagaggcctaaagtgaaaaaggaaatatcttctcataaaaagtagacagaagcattctcagaatatactttctgatttgtgcattcaactcacagagttgaaccttaattttgatagattaattttgaaacactctttttgtagaatctgcaattggacatttggagcactttaaggcctatggtgaaaaaggaaatatcttcacgtaaaaactacacagaggaattctcagaaacttctttgtaatgtgtgaattcaactcacagagttgaacccttctttgatagaacatttttgaaacactgtttttgtagaatctgctagtggacatttggaggggtttgaggcctatggtgaaacaggaagtatcttcacataaaaagtagacagaagcattctcagaaacttctttgggatgtgtgtattcaaatcacagagctgtaccattcttttgatagagcagttttgaaacactccttttgtagaatctgtaactggacatttggagcactttgagaccggtggtgaaaaaggaaatatcttcacataaaaactacacagaagcattctcagaaacctcattgtgttgtttgctttcaacccacagagttgaacattcttttccatagagcagttttgaaaccctctttttgtataatttgcaagtggatatttggaccgatttgaggcctttgttggaaacgttctatcttcacaaaaactagacagaagcattctcagaaacgtctttgtgatgtgtgtattcaacacacagagttgaacctttcttttgacagagcagttttgaaacactccttttgtagaatctgcaagtggacatttggagcactttgaggcctgtggtgaaaaaggaaatatcttcacataaaaactacacagaagtattctcagaaacttctttctgatgtgtgcattcaactcacagaattgaacctttcttttgatagagcagttttgaaacactcttttttcagaatatgcaagtggacattaggatcgctttgaagcctcaatgaaaaaggaaatatcttcacagaaaaaccacatggaaggattctaagaaacttcttggtgatgtttcctttcaaccccacagagttgagcattctttttcatagagcggtttgggaagcctctttttgtataatttgcaaatggatatttggaccactttgaggccttcgttggaaatcgggatatcgtcacaaaaactagacagaagtattatcagaaactactttgtgatgtgtgcaatcaactcacagagttgaacggttgttttgacagagcagttttgaaacactctttttgtaggatctgcaagtggacatttggagcgctttgaggcctgtggtgaaaaaggaaatatcgtcacataaaaactacacagaagcattctcagaaactactttgtgatgtttgctttcaactcacaaaattgaacattccttttcttagagcagttttgaaacactctttttgtagaatttgcaagtggatattttgaccactttgaggccttcgttggatatgggatatcttcacttaaaaactagaaagaagcattcccagaaacttctttttgatgtgtgcattcacctcacagagttgaacttttcttttgagagagcagttttgaaacacgctttttaaaggatctgcaagtggacatttggagctcattgaggcctaaagtgaaacaggaaatatcttctcataaaaactagagagaagcatcctcagaatattctttatgatgtggaaattcaactcacagagttgaaccttaattttgttagagcaattttgaaacattctttttgtagaatctgcaagtggacatttggagcgctttgaggcgtatggtgaaaaaggaaacatcttcatattaaaggtagacagaagcattctcagaaatttctttgtgatgtgtgtattcaagttacagagttgaacctttcttttgagagagccgttttgaaacactctttttgtactatctgcaaatggacatctggagcgctttgagacctttgttgaaaaaggatatatcttcacaaaaaactagaccgaagcattctgagaaacttatttcttatgttagctttcaactcgcagagttgagcactccttttcatagagccattttgaaacactctttttgtagaattcgcaagtggagatttggaccgtttgaggccttcgttggaaacaggatatcttaacagaaactagacagaagcattctcagaaacttctttgtgaagtgtgcattcaactcacagagttgaaccgatcttttgaccaagcagtttagaaacactctttttgtagtatctgcaagtggacatttggtgctctttgaggcctatggtgaaaaaggatatatcttcacttgaaaactagacagaagcattctcagaaacttccttgtgatgtgggcattcaactcacagagttgaaccactctttggatagagcagttttgaaacactctgtttgtggaatctgcaaggggacatttggagtgttttgaggcctatggtgaaaaaggaaatatcttcacataaaaactacacagaagcaatctctaaaacttgtttgtgatgtgcgcattcaactcacagagttgaacattccttttcatagagccgttttgaaacacactttttgtggaatctgcaagtcgacatttggagcactttgaggcctgaaatgaaaaaggaaatatcttcacataaaaactacacggaagcattctaagaaacttctttgtgatgtttcctttcaacccacagagttgaacattctttttcatagagcagtttggaaaccctctttttgtataatttgcaagtggatatttcgacagctttgaggccttcattggaaatcgggatatcttcacaaaactagacagaagcattatcagaaactaccttgtgatgtgttcactcaactcacagagttgaacggttgttttgatgaagcagttttgaaacactctttttgtaggatctgcaagtggacatttggagcactttgaggcctgtggtgaagaaggaaatatcttcacataaaaactacacagaagcattctcagaaactgctttgtgatgtttgctttcaactcacagagttgaacattccttttcttagagcagttttgaaacactctttttatagaatttgcaagtggatatttggaccgctttgaggcattcgttggatacgggatatcttcacataaaaactagagagaagcattcccagaaacttctttgtgatgtgtgcgttcacttctcagagttgaacttttcttttgatagaacagttttgaaacactctttttgaagaatctgcaaatggacatttggagcgcttagaggcctaaagtgaaaaaggaaatatcttctcataaaaagtagacagaagcattctcagaatatactttctgatttgtgcattcaactcacagtgttgaacctttcttttggcagagcagttttgaaacttggagcgctttgaggcctgtggtgaaaaaggaaatatcttcacataaaaactacacagaagcattctcagaaacctcattgtgttgtttgctttcaacccacagagttgaacattctttttcatagagcagttttgaaaccctctttttgtataatttgcaagtggatatttggaccgatttgaggcctttgttggaaacatgctatcttcacaaaaactagaaaaaccattctcagaaacttctttttgaagtttgcattcaaatcagagagttgaacatgccttttaatagagcagttttgaaacactctttttgtagaatctgcaactggacatttggagcgctttgagacctatggtgaaaaaggaaatgtcttcacataaaaactacacagaagcattctcagaaacctctttgtgttgtttgctttcaacccacagagttgatcattctttttcatagagcagtgtggaaaaactctttttgtagagtttgcaagtggatatttggaccgatttgaggcctttgttggaaatggtctatcttcacataaactacacagaagcatccccagaaacttctttgtgatgtgtgccttcaattcacggagttgaacatttcttttcatagagcagttatgaaacaccgtttttgtagaatctgccagtgatcatttgtggagctttgaggtctgcggtgaaaaaggaaatatcttcacataaaaactagacagaggcattctcagaaacttctttgtgatgtgtgcattcaactcttagagttgaacgttgcttttgatagagcagttttggaacgctctttttgtataatctgtaagtggacatttagtacgctttgaggtctatgctgaaaaaggaaatatcttcacataaaaactagacagaagcattatcagaaacttctttgtgatgtgtgctttcaactcacagagttgaacattccttttgatagaagagttttgaaaggctctttttgtagaatctgtaacctaatatttgaatcgctttgaggaattcgtttgaaacggtaatatcttcacataaaaattagactgaagcattctcagaaacttcttgtgataagtgcattcagctaacagagttgaacctttctgttgatagaagagatttgaaacactctttttgtagaatctgcaggtggatatttggaccgctttgaggacttcaatggaaatgagaatatcttcatataaaagctagacagaagcattatcagaaactactttctgatgtatgcattcaacacatagagttcaacctttgttttgatagagccgttttgaaacactgtttttgtagaatctgcaaggggacatttggagcgcttgaggcctatggtgaaaaaggaaatttcttcatataaaaactggcagaagcattctcagaaacttccttgtgatgtgtgtattcaactcacagagttgaacattgcttttgattcagcagttttgaaacttgtagaatctgcaagtggatatatggaccactaagaggaatttgctggaaactgtgtattttcacataaaaaccagacagaaacatactcagaaacctctttgtgatgtgtgcatttaaatcacggagttgaccattccttttgatagagcagttttgaaacactctttttgtagaatctgcatgtggacatttggagcactttgaggcctatggtaaaaaagaaaatatcttctcataacaaatagaaagaagcattctcagaaacttctttatgatgtgtgcattcaactcacagagttgaacattccttttgatagagctgttttgaaacactctttttgtagaatctgcaagtggacatttggatcactttgaggccttcgatcgaaatgggaatgtcttcacataaaaactagacggaaaaattctgagaaacttccttgtgatatgtgcctttaacccacagatttgaacagttcttttgatagagcagttttgaaacactctctttatagaatctgcaagtggacatttggtgtgctttgaggcctgtggtgaaaaaggaaatatcttcacataaaaactagaaagaagcatgctcagaaacttctttatgatgtgtgaactcaactcacatagttgaatctttcttttggtagagcagtttagaaacactctctttgtagtatctgcaggtggatatttggacagctttgaggctttcattggaaacgggaatatcttcaaataaaaactagacagaagcattctcagaaacttttttgtgatgtgtgtatccaactcacagagttgagcattctttttcatagagcagttttgaaacactctttttgtacaatctgcaagtcgacatttggagcgctttgaggcctttgttcgaaacgggaatatcttcacataaaaactagaaagacccattctcagaaacttctttgtgatgtgtgcattcaactcactgagttgaacccttcttttgagagagcagttctgaaacactctctttgtagtatctgcaagtggacttttggtgtgcttcgaggcctatggtgaaaaagaaaatatcttaacataaaaactagacagaagcattctcagaaactacttagtgatgtgtgcatttaacacacagagttcaactttccttttcatagagcagttttgaaacactctttctgtagagtttgcaagtggacatttggagcgcttggaggcctatggtgaaaaaggaaatatcttaacataaaaacaagacagaagcaatctcagaaacttctttgtgatgtgtgcactcaactgacccaggtgaaactttcttttgatagagcagttttgaaacactctttttgtagaatctgcaagtggacatttggagtgatttgtggccttcattggaaatgggaatatctttacataaaaactagacagaagcattttcagaaatttatttgtgatgttggcatttaactcaaagagttcaacattctttttcatagagcagttttcaaaccctctttgtgtagaatatgcaagtggacatttggagcgcttggaggcctatggtgaaaaggaaatatcttcacataaaaactagacagaagcattctcagaaactactttttgatgtgtgtactcacctcacagagttgaacacttcttttgctagagcagttttgtaaccctctttttgaagcatttataagtggatatttggacagctttgaggctttcgttggaaccgggaatatcttaacataaaaactagacagaagccttctcagaaacttctttgtgatgtgtgcattcaactcacagtgttgaaactttctttaaatagtgcagatttgaaacactctttttgtagaatttccaagtggatatttagagagctttgaggccttcgtaggaaaagggagtatcataacataaaaactaggcagaagcattctcagaaacttctttgtgatgtttgcattcaactcacacagttgaccgttacttttcatggagcagttttaaacaatctttttgtagaatctggaggtagacatttggagcgctttgaggcctactgtgaaaaggaaatatcttcacataaaaactagacagaagcattttcagaaacttcattgtgatgtgtgtactcaactcacagagatgaaccttacttttgatagagcagttttgaaactcactttttgtagaatctgcaaatggttatttggacagctttgaggctttcgttggaaacgggaatatattcacgtaaaaactagactgaatcattctcagaaacttctttgtgatgtgtgtattcaactcacagagttgaacattccttttcatagagcagttttgaaacactctttttgtacaatctgcaagtcgacatttggagcgctttgaggtcttcgttcgaaacgggaatatcttcacatgaaaactagaaagaaccattctcagaaacttctttgtgatgtgtgcattcaacccactgagttgaacccttcttttgagagagtagttctgaaacactctctttgtagaatctgcaagtggacgttttgtgtgctttgaggcctatggtgaaaaaggaaatatcttaacataaaaactagacagaagcattctcagaaacttctttgtgatgtgtgcatttaactcacagagttcaactttccttttcacagagcagttttgaaacactctttgtgtagagtctgcaagtggacatttggagtgcttggaggcctatggtgaaaaaggaaatatcttcacataaaaactagacagaagcattctcagaaacttctttttgatgtgtgtactcacctcacagagatgaacccttcttttggtagagcagttttgtaaccctctttttgaagcatttgcaagtggatatttggacagctttgaggctttcgttggaaccgggaatatcttaacataaaaactagacagaagccttctcagaaacttctttgtgatgagagcattcaactcacagtgttgaaactttctttaaatggtgcagatttgaaacactctttttgtagaatttccaagtggatatttagacagctttgaggacttcgctggaaacgggagtatcttaacataaaaactaggcagaagcattttcagaaacttccttgtgatgtttgcattcaacacacatatttgaccatgacttttcattgagcagttttgaaacactctttctgtagaatctgcaggtagacatttggagtgctttgaggcctactgtcaaaaggaaatgtcttcacataaaaactagacagaagcattctcagaaacttcattgtgatgtgtgtactcaactcacagagttgaacctttcttttgatagagcagttttgaaactctctttttgtagaatctgcaaatggttatttggacatctttgaggctttcattgaaaacgggaatatcttcgaataaaaactagacagaagcattctcagaaacttctttgtgatgtgtgtattcaactcacagagcttaacattccttttcatagagcagttttgaaacactctttttgtagaatctgcaagtcgacatttggagcgctttgagaccttcgttcgaaacgggaatatcttcacataaaaactggaaagaaccattctcagaaacttctttgtgatgtgtgcattcaactcacagagttcaacccttcttttgagagagcagttctgaaacactctctctgtagaatttgctggtggacttttggtgtgctttgaggcctatggtgaaaaaggaaatatcttaacataaaaataagacagaagcattctcagaaacatctttgtgacgtgtgcactcaactcacagggttgaaactttcttttgatagagcagttttgaaacactctttttgtagaatctgcaagtggatatttggagcactttgtggccttcattggaaatgggaatacctttacataaaaactagacagaagcattctcagaaacttctttatgatgtttgcatttaacccacagagttcaacattctttttcatagagcagttctgaaacactctttgtgtagaatttgcaagtggacatttggagagcttggaggcctatggtgaaaaaggaaatatcttcacataaaaactagacagaagcattctcagaaacttctttttgatgtgtgtactcacctcacagagatgaacccttcttttggtagagcagttttgtaaccctctttttgaagcatttacaagtggatatttgaacagctttgaggctttcgttggaaccaggaatatcctaacataaaaactagacagaagccttctcagaaacttctttgtgatgtgtgcattcaactcacagtgttgaaactttctttaaatagtgcaaatttgaaacaccctttttgtagaatttccaagtggatatttagacagctttgaggccttcgcaggaaaagggagtatcataacataaaaactaggcagaagcattctcagaaacttttttgtgatgtttgcattcaagtcacacagttgaccattacttttcattgagcagttttgaaacactgtttttgtaggatctgcaggtagacatttggagcgttttgaggcctactgtgaaaaggaaatatcttcacataagaactagacagaagcattctcagaaacttcattgtgatgtgtttactcaactcacagagtggaacctttcttttgatacagcagttttgaaacactctatttgtagaatctgcaagcggatatttgaatagttttgaggctttcgttggaaacgggaatatcttcacgtaaaaactagacagaagcattctcagaaacttctttgtgatgtgtgtattcaactcacagagttgaacattccctttcatagagcagttttgaaacactctttttgtagaatctacaagtcgacatttggagcgctttgaggccttcgttcgaaatgggaatatcttcacataaaaactataaagaaccattctcagaacctttttgtgatgcgtgcgttcaactcacagagttgaacccttcttttgaaagtgcagttctgaaacactctctttgtactatctgcaagtggaattttggtatgctttgaggcctatggtgaaaaaggaaatattttaacatgaaaacaggacagaagcattctcagaaacacctttgtgatgtgtgcatttaactcacagagttcaactttccttttcatatagcagttttgaaacacaccttgtgtagagtctgcaagtgcacatttggagcgcttggaggcctaatgggaaaaaggaaatatcttcacataaaaactagacagaagcattctcagaaacttctttttgatgtgtgtactcaattcacagagatgaacctttcttttgctagagcagttttgaaaccctctttttacattatttgcaagaggatatttggacagctttgaggccttcactcgaaacgggaatatcttcacataaagactagacagaagcattctcagaaacttctttgtgatgtttgcattcaactcacagagttgaacattccttttcatatagcagttttgaagcactctttttgtagaatattcaagtggacatttggagcgctttgaggcctatggtgaaaaagggaacatcttcacataaaaactagacagaagcattctcagaaacttctttttgatgtgtgtactcaactcacagatttgaacatttcttttgatagagcagttttgaaacactctctttgtagtatctgcaagtggatatttggactctttgaggctttctttggaaacgggaatatcttcacataaaagctagacagaagcattctcagaaactacttcgtgacgtttgcattcaactcagagagtagaacattgcttttcatggagcagttttgaaacactctttttgttggatctgcaagtggacatttggagcgcttggaggcctatggtgaaaaagaaatatcttcacataaaaactagacagaagccgtctcataaacttctctttgatgtgtgtactcaactcacagagatgaacttttcttttgctagagcagttttgtaatcctctttttgaagcatttacaagtggatattcggacagcgatgaggctttcattggaaacgggaatatcttaacataaaaactagactgaagccttctcagaaacttctttgtgatgtgtgcattcaactcccagtgttgaaactttcttttgatagagcagattggaaacactctctttgtagaatctacaagtgtatatttgtacagctttaaggctttcgttggaaacgggaatatcttcacttaaaaactagacagaagcattctcagaaacttctctttgatgtttcgcattcagctcacagagttgaacattcctttccatagagcacttttgaaacactctttttgtagtatctgcaagtgggcatttggagagctttgaggcctgtggtgaaaaaggaaatatcttcacataaaaactagatagaagcattctcagaaacttctttgtgatgtgtgcattcaactcacagagttgaacattccttttcatagagcagttttgaaactctctttttgtagaatctgcaagtggacattttgaccactttgaggccttcattcgaaacgggaatatcttcaaataaaagtacacagaagcattctcagaaacttctttgtgatgtgtgcattcaactcacagagttgaacccttcttttgatacagcagttttgaaacactctcttcgtagaatctgcaattggacatttggtgtgctttgaggcctatggtgaaaaaagaaataactttacataaaaactagacagaagcattctcagaaacttctttctgatgtttgcgtttaactcacagagttgaacagtccttttcatagagcagtttgaaacactctttttgtagaatctgcaggtggacatttggagcgcttggaggcctatgatgaaaaaggaaatatcttcacataaaaactagacagaaacattctcagaaactgcttttttgatgtgtgtactcacctcacagagatgaacatttctttttctagagcagtttttaaacacccttttggaagcatttacaagtggataattggagagctttgaggctttcgttggaaaccggaatatcttcacataaacactggaacgaagcattctcagaaacttccttgtgatgtgtgcattcaacttacagtgttgtaactttcttttgatagcgtagattggaaacactctttttgtagaatttgcaattggatatttggacacctttgaggccttcgctgaaaacgggtttatcttcacataaaaactagacagaagcattctcagaaacttctttgtgatgtttgcattcaactcacagagttgaacattccttttcatagagcagttttgaaacacactttttgcagaatctgcaagtggacacatggagcgctttgaggcctatggtgaaaacggaaatatcttcacataaaaactagacacaagcattctcagaaacttctttttgatatgtatactcaactcacagagttaaactttcttttgatagatcagttttgaaacattcttcttgtagaatttacaattggatattaggacagccttgaggttttctttggaaacaggaatatcttcacatataaactaggcaaaagcattctcagaaacttcattgggaagtttccattcaaatcacagagttgaatatttcttttcatagagcagttttgaaacactctttttgtagaatctgcaagtggacatttggagcgctttgaggcctactgtgaaaaaggatatatcttcacataaaaactagacagaagcattctcagaaacttctttgtgatgtgtgtactcaacacaaagagttaaacctttcttttgatagagcagttttgaaacactcttcttgtagaatttacaagtctataattggacagctttgagacttttgttggaaacggaaataacttcacctaaaaagtagacggaatcagtctcagaaacttctttgttttgtgtgcattctactcacagtgttgaaaatttccttttatagagcagaaaggaaacaatgtttttgtagaatgtgcttgtggatatttggacggctttgaggccttcacaggaaacgggactatcatcatataaaaactagacagaagcattctcagaaacttctttttgatgtgtatactcaacttacagagttgaacatttcttttgttagagcagttttgaaacactatttttgtagggtctgcaaggggatatttggatagctttgtggctttctttggaaacggggattacttcacataaaaactacacagaagcattctcagaaacttctttgtaatgtttgaattcaactcacagagttgaacattccctttcatagagcagttttgaaacactctttttctagaatctgcatgtgaacatttgaagcgctatgaggcctatggtgaaaaagaaaatatcttcacataaaaactagacagaagcattctcaaaaacttctttgtgatgtgtgtactcaactcacagagttaaaactttcttttgatagagcagatttgaaacactctttttctaggatttacaagttgatattaggacagctttgaggctttcgttggaaacgggaataccttcacataaaaaatagaagcattctagaaacttctttgtgaacgttgcattcaactcacagagttgaacatgccttttaatagagcagttatgaaacactctttttgtagaatctgcaagtggacgctttgaggcctatggtggaaaaggaaatatcttcacataaaaactagacagaagcattctcagaaacttctttgtgatgtgtgtactcaactcacagagttgaacctttctattgatagagcagttttgaaacactctttttgtaaaacctgcaaatggacatttggagcgattttaggcctatggtgaaaaaagttatatcttcacataaaaacaagacagaagcattctcagaaacttctttgtgatgtgtgcactcaacacacagagttaaaactttcttttgacagagcagttttgaaacactcttcttgtagaatttacaagtcgataattctacagctttgaggcttttgttggaaacggaaataacttcacctaaaaactagacagaagcattctcagaaacttctttgttttgtgtgcattccactcacagtgttgaaaatttcttttgatagagccgattggaaacactctttttgtagaatttactagtggatatttggacagctttgaggccttcacaggaaatgggaatatcttcacataaaaactagacagaactattctcagaaacttctttgtgatgtgtatactcaactcacagagttgaacacttcttctgatagagcagttttgaaacactctctttgtagaatctgcaagtggatatttggacagctttctggctttcgatggaaacggggatatcttcacataaaaactacagagaagcattctcagaaacttctttgtgatgtttgcatacaactcacagagttgaacattccttttcatagagtagttttgaaacactctttttgtagaatctgcaagtgaatatttggagcgcttcgaggcctacggtgaaaaaggaaatatcttcacataaaaaccggcagaagcattctcagaaacttctttgtgatgtgtgtactcaactcacagaattaaacctttattttgatagagcagttttgaaacactcttctacaagaatttacaattggataataggacagctttgaggctttcgttggaaacgggaatatcttcacataaaaactagatagaagaattctcagaaacttctttgtgaagtttgcattcaaatcacacagttgaacatcccttttattagagcagttttgaacactctttttctagatcctgtaagtggacatttgcagcgctttgaggcctacggtgaaaaaggaaatatcatcacaaaatactagacagaaggattctcagaaacttctttgtgatttgtgtactcaactcacagagttaaacctttcttttgatagagcagttttgaaacactcttcttgtacaatttacaagtggatattaggacagctttgaggctttcgttggaaacgggaatatcttcacatagaaattagacagaagcattctcagaaacttctttgtcacgtgtgcattcaactcacagagttgaaactttcctttgatagagcagattggaaacacactttttgaaatatttgcaagtggatatttggacagctttgaggctttcgctggaaatgggtgtatcttcacaaaaaaactagacagaagcattctcagaaacttctttgtgatgtgtgtactcgactcacagagttgaacctttcttttgatagagcagttttcaaacacacttcttgcagaatttacaagtggatattaggacagatttgaggctttcgttggaaatgggaatatcttcacacaaaaagtagacagaagcattctcagaaacttctttgtgaagtttgcattcaaatcacatttttgaacataccttttaatagagcagttttgaaacacactgtagaaactgcaagtggacatttgcagcgctttgaggcctatggtgaaaaaaaaaatcttcgtataaaaactagacagaagcactctcagaaacttctttgtgatgtgtgtactcaactcacagagttaaaccattcttttgatagaggggttttcaaaaacacttcttgtagaatttacaattggatattaggacagctttgaggcttttgttggaaaccagaatatcttcacacaaaaactagacagaagcattgtcagaaacatctttgtgaagtttgcattcaaatcacatagttgaacttaccttttaatggagcaattttgaaatactgtttttgaagggtctgcaagtggacatttgcagcgctttcaggcctttagtgaaaaaggaaatatcttcccataaaaactagacagaaacattctcagaaacttctctgtgatgtgtgtaatcaactcacagagttgaaactttcctttgatagagcagtttcgaaacaatcttgtagaatctgcaagtggatatttggacagctttgaatctttcggtggaaaagggaatatcttcacatgaaaactagacagaagaattctcaaaaacttctttgtgatgtttgccttcaactcacagagttgaacattccttttcttagagcagttttcaaacactctttttgtagaatctgcaagtggacatttggagcgctttcagtcctattgtgaaaaaggaattatcttcatataaaaactagacagaagaattctcagaaacttctttgtgatgtgtgtactcaactcacagagttaaacctttcttttgatagagcagttttgaaacactctgcttgtagaatatgtaagtggatatttcgacagctttgaggctttcgttggaaacgggaaaatcttcacatagaaactacacagaagcattctcagaaacttctttgtgatatgcgtcttcaactcacagagctgaaactttcctttgacggagcagatttgaaacacactttttgtagaatttgcaagtggataggtttgaggtttggacaggtttgaggccttcgctggaaacgggagtatcttcacaaagaaactagatagaagcattctcagaaactactttgtgatgtgtgtactaaactcagagagtagaacctttcttttgatacaacagttttgaaacactctgtttgtagaatttgcaagtcgataattggacagctttgaggctttcgttggaaacgggaatatcttcacatagaaactagacagaaacattctcaaaaactgctttgtgatgtgtgcattcaactcacagagttgaaactttcttttgatagagcagatttgaaacacactttttgtagaatttgcaaatggatatttggacagctttgaggacttcacaggaaactggagtatcttcacaaaaaaactagacagaaggattctcagaaacttcttgtgatgtgtgtgatcaactcgcagagttgaaacattcttttgatagagcagttttgaaacactgtttttgtagaatctgcaggtggatatttggatagctttgaggctttcatgggaaacgggaatattttcacataaaaactagatagaagcattctcagaaacttctttgtgttgtgtgcattctactcacagtgttgaaaatttcttttgatagagcagattggaaacactctttttgtagaatttgctagtggatatttgtacagttttgaggtctacgcaggaaatgggaatatcttaatataaaaactagacagaagtattctcagaaacttctttgtgatgtgtatactcacctcacagagttgaacatttcttctgatagagcagttttgaaacactctctttgtagaatctgcaagtggatatttggacagctttctggcttcaatggaaatggggatatcttcacataaaaactagacagaagcattctcaaaaacttctttgtgatgtctgcattcaactcacagagttgaacattccttttcatagagaagatttggagcactctttttgtagaaactgcaagagaacatttggagcacttcgaggcctaaggttaaaaaggaaatatcttcacttaaaaactagacagaagaattctcagaaacttcttcgttatgtgtgtactcaactcacagagttgatcctttcttttgatagagcagttttgaaaaacactctttgttgaatctgcaagtggatatttggacagctttgaaactttctttggaaatgtcaatatcttcacataaaaactagacagaagcattctcagaaacttttttgtgaagtttgcattcaaatcacagagttgaacataccttaaatagagcagttttgaaacaatctttttgtagaatctgcaagtagacatttgcagcgctttgaggcctaaggtgtaaaaggaaatatcttcacataaaaactagacagaagcattctcagatacttctttgtgatatgtgtactcaactcaccgagttgaacctttcttgtgatagagcagttttgaaacactctctttgtagaatctgcaattggatatttggacagcattgaatctttcgttggaaacgggaatattttcacataaaaactaaacagaagcattctcagaaacttctttgtggtgtgtgcactcaagtcacagaattgaacctttcttacaatagagcagttttgaaaccctctctttgtagaatatgcaagtggatatttggacagctttgaatctttcgttggaaactggaatatcttcacataaaaactagacagaagcatactcaataactactttgtgatgtttcccttcaactcacagatttgaacattctttttcatagagcagttttgagacactctttttgtcgaatctgcaaggggacatttggagcgctttgaggcctatggtgaaaaaggaaatatcttcatataaaaactagacagaagcattctcagaaacttctttgtgatgtgtgtagtcaactcacagggttaaacctttcttttgatagagcagatttcaaacactcttcttgtagaatttacaagtggatattaggacagctttgagggtttcgttggaaaaggaatatcttcacataaaaactagacagaagcattctcagaaacgtctttgtgaagtttgcattcaaatcacacagatgaacataacttttaatggaacagttttgaaacactctttttgtaggatctgcaagtggacatttgcagcgctttgaggcctaaagtgaaaaaggaaatatcttcacataaaaactagatagaagcattctcggaaacttctttatgaagtttgcattcaaatcagagttcaacatacattttaatagagtagttttgaaacactctttttctagtatatgtcagtggacatttgcagcgctttgaggcctatggtgaaaaaggaaatatcttcacattaaaactagacagaagcattctcagaaacttctttgggatgtgtgtactcaactcaccgaattaaacctttcttttgatagagcagttttgaaacactcttcttgtagaatttacaagtcgataattggacagctttgaggctttcgttggaagcgggtatatattcacatagaaactagacagaagcattctcagaaactactttgtgatgtgtgcattcaactcacagagttgaaattttcttttgatagaccagatttgaaacacactttttgtagaatttgctagtggatatttggacagctttgaggccttcgcaggaagcgggaatatcttcatataaaaactagacagaattattctcagaaacttctttgtgatgcgtatactcaacttacagagctgaaactttcttttgatagagcagttctgaaacattcttcttgtagaatctgcaagtggatatttggacagctttgaatctttccttggaaacgggaatatcttcacataaaaactagacagaagcattctcaaaatcttctttgtgatgtttgccttcaactcacagatttgaacacaccttttcatggagcagttttgaaacactccttttgtacaatctgcaagtggacacttggagcgctttgaggcctatggtgaaagagaaaatatcctcatatagaaacgagacagaagcattctcagaaacttctttgtgatgtgtgtactcaacttacagagttaaacttttcttttgatagagcagttttgaaacactctctttgtagtatgtgcaattggatatttggacagctttgaatctttctttggaaacgggaatatcttcacataaaaactagacagaatcattctcagaaacttctttgtgaagtttgcattcaaatagcagagttcaacattccttttaatagagcagttttgaaacacagtttttgtagaatctgcaagtggacatttgcagtactttgaggccaatggtgaaaaaagaaatatcttcacataaaaactagacagaagcattctcagaagcttctttgtgatgtgtgcactcaactcacagaattgaacctttcttttgatagatcagtttggaactctctctttgtagaaactgtaagtggatattttggcagttttggatctttcgttggaaacgggaataacttcacataaaaactagacagaagcattctcaaaaactactttgtgatgtttgccttcaactcacagagttgaacattccttttcatagagcagttttgtaacactttttttgtagaatctgaaagtggatatttggagcgctttgaggcctatcgtgaaaaaggaaatatcttcacataaaaactagacagaagcattctcagaaacttctttgttatgtgtgtactaaactaacagatttgaaccttttttttgatagagcatttttgaaacactctctttgtagaatctgcaagtggatgtttggaaagctttcaatccttcgttggaaacgggattatcttcacataaaaactagacagaagcattctcagaaactagtttgttaatgtgttctcaactcacagaattaaacctttcctttgatacagcacttttggaacactcttgttgtaaaatttacaagtagatattaggacatcattgaggatttcgttggaaacgggaatatcttcacataaaactagacagacgcattcttagagacttctttgtgatgtctgcattcaactcacagagttgaaactttcttttgatagagcagataggaaaccctctttttgcctaatttgcaagtgggtatttagacagctttgaggcctttgctggaaacgggtatatcttcacatagaaaatagacagaagcattctcagaaacttctttgtgatgcttgcattcaactcacagagctgaacactccttttcatagagcagttttgaaacactctttttgaagaatctggaagtggaaatttggagggttttgaggcctatggtgaaaaaggaaatatcttcccataaaaactagacagaagaattctcagaaactactttgtgatgtgtgtactcaactcacagcgttgaatctttcttttgatacagcagtgttgaaacactctttttgtagaatctgcaaatcgatattttgatagctttgaggtttttgctggaaacgtgaatatcttcacaaaaaactggacacaagcattctcagaaacttgtttgtgagtcttgcattcaactcacagagttaaacattccttttcatagtctagttttgaaacactctttttgtagaatctgcaagtggacatttggagcgatttgagacctatagtgaaaaaggaaatatcttcacataaaaactagacagaagcattctcagaaactgctttgtgatgtgtgtactcaactcacagagttgaaccttacttttgatacagcagttttgaaaaactttttttgtagagtctgcaagtggatatttggatagctttgaggctttcattggaaacgggaatatcatcacaaaacaactagacaaaatcattctcagaaacttctttgtgatgtttgcattcaattcacagagttgaacattccttttcatagagctctattgaaacactctttttgtaaaatctgctagtggacattaggagctatttgagaccaatggtaaaaaaggaaatatcttcacataaaaagtagacagaagcattctcagaaactactttgcgatgtgtgtactaaactcaaagagttaaacctttcctttgatacagcagttttgaaacactctttttgttgaatttacaagtggatattggagagcattgaggatttcgttagaaacgggaatatcttcacataaaactagacagaagcattctcagacacttatttggatgtctgcaatgatctcacagacattctcagacacttccttgtgatgtgtgcattgaactcacagagttgaaactttcttttgatagagcatatttgaaacactctttttgtagaatttgcaagaggatatttggacagatttggggccttcgctgtaaaagggtataccttcacataaaaactagacagaagcattctcagaaacttctttgtgatgtgtgtactcaactcacagagatgaacctttcttttgatagagcagttttgaaaaactctttttgaaggatctgcaagtggctatttggatagctttgaggatttcgttggaaacgggaatatcttcacataaaaactagacagaagcattctcagaagcttctttgtgaagtttgcattcacctcacagagttgaacactccctttcattgagcagttttgtaaccctctttttgtagtatctggaagtgaacatttggagggctttgaggtctacggtgaaaaagggaacatcttcacataaaaactagacagaagcattctcagaaactactttgtgatgtgtgtactcaattcccacagttgaatctttgttttgatagagcagttttgaaacactctttttgtagaatctgcaagtggatatttggatacctttgagtctttcgttggaaacgtgaatatcttcacatataaacagtacacaaccattctcagaaacttctttgtgatgtttgcatacaactcacagagttgaacattccttttcatagagcagatttgaaacactctttttgtagaatctgcacgaggacatttggagcgattggagacctatagtgaaaaaggaaatatcttcacataaaaactaaacagaagcattctcagaaacttctttgagatgtgtgtactcaactcacagagttgaaactttcttttgatacagcagttttgaaacagtctttttgtggaatctgcatgtggatatttggatagatatgaggctttctttggaaaagggactatcatcacaaaaaaactagacagaagcattctcagaaagttctttgggatatttgcattcaactcacagagttgaacattcctttcctgagagtagtattgaaacactctttttgtagaatctgcaagtggacatttggagcgatttgagacctatggtgaaaaaggaaatatcttcacataaaaagtagacagaagcattctcagaaactgctttttgatgtgtgcactaaactcaatgagttaaactttcctttgatacagcagttttgaaacactcttcttgtagaatttataagtggatattaggagagcattgaggatttcattggaaatgggattatcttcacataaaactagacagaagcattccatgaaatttctttgtgatgtgtgtactcaacttacagagttgaaactttctcttgatacagtagtttagaaacactctttttgtagaatctgcaagtggatatttggatagctttgaggctttcgttggaaacgggaatatcttcacataaaaactagacagaaggattctcagaaacttctttctgatgcctccattcaactcacagtgttgaactttccttttcatggagcagttttgaaacaacctttttgtagaatctgtaagtggaaacttggagcgctttgaggcctgtggtgaaaaaggaaatatcttcctataaaaactagacagaagaattctcagaaacttctttgtgatgtgtgtactcaactcacagagttgtacttttcttttgatagagcagttttgaaacactctttttgcagtgtctgcaagtggatattttgttagctttgaagattacattggaaacgggaatatctttacatataaactagacagaagcattctcagaaacttctttgtgatgtttgcattcacctcacggagttgaacattccctttcatagagcagttttgaaaaactctttttgcagtatctggaagtggacattttgaacgctttgagacctatggtgaaaaaggaaatatcttcacataaaaactagacggaagcattctgagaaactactttgtgatgtgtgtactcaattcatgtagttgaacctttgttttgataaagcagttttgaagcactctttttgtagaatctgcatgtggatatttggatagatttgaggttttcgttggaaacgggaatatcttcacataaaaactagacagaaggattctcagaaacttttttgtgatgtttgcattcaactcacagagttgaacattccttttcatagcagttttgaaacactctttttgtagatctgtaagtggaaaattggagctctttgaggcctgtggtgaaaaaggaaatatgttcacataaaaactagacagaaacattctcagaagtttctttgtgatgtgtgtactcaactaacagatttgaaactttcttttgatacagcagttttgaaacactctttttgttgaatctgtaagtggatatttggatagctttgaggctttcgttggaaacgggaataccttcacttaaaaactagagagaagcattctcagaaagtaccttgtgatgtttgcattcaactcaaagagttcaacattcctcttgatagagcagtttggaaaccctctttttgtattatctgcaggtggatatttggacctcttagaggcattctttgaaacgggttttcttcatataaacaagacagaagaattctcagaatctactttgtgatgtgtgctttcaactcacggagtttaatcttcctttcgatagagcagtttagaaacactctttttgtggaatttgcaagtgtacatttatagtgctttgaggcctatgttagaaaaggaaatatattcacataaaaactggacagaagcattctcagacactaattcgtgatgtttgcattcaactcactgatttgtccattcctcttaataaagtagttttgaaatactctttttgtacaatctgcaagtggatatttggacttctttgaggctatcgttggaaatgggatttcttcatataaaactagacagaagaattcgcagaaacttctttgtgaagtgagcattcatctcgcagatatgaaccttcctttcgatagagcagttttgaaacactctttttgttgaatttccaaatggatatttagagcattttgaggcctgtggtagtaaaggaaatatcttcatagaaaaactagacagaatttttctgagaaactgctttttgatgtgtgggttcaactcatagagtttaacctttcttctgatagagtagttttgaaacaatctttttgtagaatttccaagtggatatttagagcgtttggaggcctatggtagaaaaggaaatatcttcatagaaaaactaaacagaatcattctcagaaactactttgtgatttgtgtgttgaactcacagagtttaacatttcttttgatagagcagttctgaaacacagtttttgtagtatttgcaagtgcatatttagagtgctttgaggccaatggtagaacaggaaatacattcacatgaaaactagacagaagcattctcagaaactactttgtgatgtttgtattcaacttacaaagttgaacgttcctcttgacagagcagttttgaaacactcgttttgtagattctgcaagtggatatttggacccctttaaggccttcattggaaacgggatttcttcatataaaactagacagaagaattctcagaaactcttttggaatgtgtgcgttcaactcacagagtttaaactttctattgatagaggagttctgaaacactctttttgtagaatttgcaagtgtatatttacagcgctttgaggcctattgtaaaaaaggaaatatcgtcacataaaaactagacagaagcattctcagaaactactttgtgatgtttgcattcaactcccagagctgaacattcctcttgatagagcagttttgaaacactctttttgtagaacatggaagtggaaatttggacatctttgaggccttcgttggaaatgggatttcttcatataaaattagacagaagaattctcagaaacttctctgtgatgtgtgctttcaactcacagagttgaaccttcctttcgatagagcagttttgaaacactcgttttgtagaatttccaagtggatatttagatcggcttgaggcctatgttagaaaagtaaatatcttcatataaaaactagacagaatgattctcagagactactttatgatgtgtgcgttcaactcacagagtttaacctttcttttgatagagcagttttaaaactctcttttgtagaatttgcaagtgtatatttagagtgctttgaggcctatgtaagaaaaggatttatcttcacataaaaaacagacagaagcattgtcagaaagtattttgtgatgtttgcattcaactcacagagttgaacattcctcttgatagagcacttttgaaacactctttttgtggaatctgcaagtgaatatttggacttttttgaggccttcattggaaacgggctttcttcacataaaacttgacagaagaattctcagaaacttctttgtgatgtgtgcattcaactcacagagtttaacatttattttgatggagtagatttggaacactctttttgtagaatttgcaagggtatatttagagtgctttgaggcctatggaagaaaaggatatatcttcacataaaaaccagacagaagcattctcagaaactattttgtgatgtttgcattcaactcacagagtttaatatttcttttggtagagcagttttgaatcacagtttttgtagtatttgcaagtgcatatttagagtgctttgaggcctatggtagaagaggaaatatcttcacataaaaactagacagaagaattgtcagaaactactttgtgatgtttgcattccactaacagatttaaacattcctcttgatagagcagttttgaaacactttatttgtagaatctgcatgtgaatatttgaaactttttgaggcattcgttggaaacgggatttcttcatagaaaagaagacagaagaattctaagaaacattttgtgatgtgtgcattcaactcacagtgttgaaacttcctttcaatggagcatttttgaaacactctttttgtagaatttccaaatgaatatttagagtgcttggaggcctatggtagaaaagtaaatatcttcatagaaaaactggagagaatcattctcattatctactttgtggtgtgtgctttcaactctcagagtttaacatttcttttgatagagcagttttgagacgctctttttgtagaatttgcaagtgtgtatttagagggcttttaggcctagggtagaaaaggaaatatcttcatataaacacaagacagaagcattctcagaaactattttgtgatgtgtgccctctactaacagagttgaacattcctcttgatagagcagttttgaaacactctttttgtagaatctgcaagttgatattttggcctctttgaggcgttcattggaaacgggatttcttcatataaaactagacagaagaattctcagaaactattttgtgatctgtgcgtttaactcacggagtttaacctttctttgatagagcagttttgaaacactctttttgtagtgattgcaagtgtatatatagagagctttgaagcctatgttagaaaaggaaatatcttcacataaaaaccagacagaaccattctcagaaactactttgtgatgtttgcattcaactcacagagttgaacattccccttgatagagcagttttgaaactctattttgaattatctgcaagtggatatttggacctctttgaggccttcgttggaaacgagatttcttcatataaaactaaacagaagaattctcagaaacgtcttcatgatatgtgcgttcaactcacaaagtttaacctttcttttgatagagcagttttgaaacactctttttgtaggatttgcaagtgtatatttagagtgctttgaggccaatggtagaaaaggaaatatcatcacataaaaactagacagaagcattctccgaagctaattcgtgatatttgcattcaactcatagagttgaacattcttcttgatagagcagttttgaaacactctttttgtagaatttgcaagtgtatgtttagaatgcttttaggtctatggtagaaaagggtatatcttcataaaaatactagacagaataattctcagaaactattttgtgatgtgtgcgttcagcttacagaggagtttaaagtttcttttgatagagcagttttgaaacactctttgtggaatttgcaagtgtgtatttagagcgctttgaggaatatggtagaaaaggaaatatcttcacataaaaactagacagaaggattgtcagaaactactttctgatatttgcattcaactcatagagttgaacattcttcttggtagagcagttttgaaacactgtttttgtagaatctgcaagtggatggttggacctttttgaggccttcattggaaacgggatttcttcatataaaactagacagaagaattctcagaaacttctttgtgatgtgtgcattcaactcacagagttgaacattcctttcaatagagcagttttgaaacactctttttgtggaatttccaagtggatatttagagcggtttgaggcctatggttgaaaagtaaatatcttcatataaaaactagacagaatgattctcagaaactactttgtgatgtgggcgttcaactcacagagtttaacctttcttttgatagagcagttttgaaacactctttttgtagaatttgcaagtttttatttagagtgctttgggacctatggttggaaaggaaatttcttcacataaaaactagacagaagcattctcagaaactattttgtgatgtttgcattcaactcacaaagttgaacattcctcttgatagagcagttttgaaacactctttttgtagaatctgcaagtggatatttggacctctttgaggccttctttggaaacgggatttcttcatataaaactagacagaagaattctcagaaacttctttgtgatgtgtgcattgaactcacagagatgaaacttcctttcgatagagcagttttgaaacactgtttttgaagaagttccaagtgtatatttagagctctttgaggcctatggtagaaaaggaaatatcttcatagaaaaactagacagaatcattctcagaaactactttgtgacgtgtgcgttcaaatcgcggagcttaacatttcctttgatacagcagtttgaaacactctttttgtagaatttgcaagtgtttacttagagtgctttggggcctatggtttttttttttcattcattccaaattgctttattttgtgattaaagtagataatatagctgtaagtctgttcaggatcacagtcataactatcttttttttgcctatatatgggcacacatttgtacagctgtgtatgtgattcacttatatatattgccttccttggtgacattgcaaggatctttttttttattattatactttaagttttagggtacatgtgcacattatgcaggttagttacatatgtatacatgtgccatgctggtgcgctgcacccactaagtcatcatctagcattaggtatatctcccgatgctatccctcccccctacacccaccccacaacagtccccagagtttgatattccccttcctgtgtccatgtgatctcatttttcaattcccacctatgagtgagaatatgcagtgtttggttttttgttcttgcgatagtttactgagaatgatgatttccaatttcatccacgtccctacaaaggacatgaactcatcattttttatggctgcgtagtattctatggtgtatatgtgccacattttcttaatccagtctatcattgttggacatttgggttggttccaagtctttgctattgtgaataataccgcaataaacattcgtgtgtatgtgtctttatagcagcatgatttatagtcctttgggtatatacccagtaatgggattgctgggtcaaatggtatttccagttctagatccctgaggaatcgccacactgacttccacaatggttgaactagtttacagtcccaccaacagtgtaaaagtgttcctatttctccacatcctctccagcacctgttgtttcctgactttttaatgattgccattctaactggtgtgagatggtatctcattgtggttttgatttgcattactctgatggccagtgatgatgagcattttttcatgtgttttttggctgcataaatgtcttcttttgagaagtgtctgttcatgtccttcgcccactttttgatggggttgtttgtttttttcttgtaaatttgtttgagttcattgtagattctggatattagccctttgtcagatgagtaggttgcaaaaattttctcccattttgtaggtggcctgttcactctgatggtagtttcttttgctgtgcagaagctctttagtttaattagatcccatttgtcaattttggtttttgttgccattgctattggtgttttagacatgaagtccttgcccatgcctatgtcctgaatggtaatgcctaggttttcttctagggtttttatggttttaggtctaacgtttaagtctttaatccatcttgaattgatttttgtataaggtgtaaggaagggatccagtttcagctttctacataaggctagccagttttcccagcaccatttattaaatagggaatcctttccccattgcttgtttttctcaggtttgtcaaagatcagatagttgtagatatgtggcattatttctgagggctctgttctgttccattgatctatatctctgttttggtaccagtaccatgctgttttggttactgtagccttgtagtatagtttgaagtcaggtagtgtgatgcctccagctttgttcttttggcttaggattgacttggtgatgcgggctcttttttggttccatatgaactttaaagtagtttttttgaggccagcatcattctgatactaaagccaggcagagacacaacagaaaaagagaattttagaccaatatccttgatgaacatcgatgggaaaattcctcaataaaatactggcaaaacgaatccagcagcacatcaaaaagcttatccaccatgatcaaatgggcttcacccctgagatgcaaggctggttcaatatacgcaaatcaataaatgtaatccagcatataaacagagccaaagacaaaaaccacatgattatctcaatagatgcagaaaaagcctttgacaaaattcaacaacccttcatgctaaaaactctcaatagattagttattgatgggaagtatttcaaaataataagagctatctatgacaaacccacagccaatatcatactgaatggagaaaaactggaagcattccttttgaaaactggcacaagacagggatgccctctctcaccactcctattcaacatagtgttggaagttctggccagggcaattaggcaggggaaggaaataaagggtattcaattaggaaaagaggaagtcaaattgtccctgtttgcagacgacatgattgtatatctggggcctatggttgaaagggaaatttcttcacataaaaaatagacagaagcattctcagaaactattttgtgatatttgcattcaactcacacagttgaaaattcttattgatagagcagatttgacacaatatttttgtagaatctgcaagtggacaattggagcgatttgggacctatggtgaaaaaggaaatatcttcacacaaaaagtagacagaatcattctcagaaactactttgtgatgtgtgcactcaacacacagagttaaaactttcctttgatatagcagatttgaaacactcttcttgtagaatttacaagtggatataaggacagcattgaggatttcgttggaaatgggaatatcttcacataaaactagacagaagaattctcagaaacttctttacgatgtgtgcattcaactcagagagttgaaactttcttttgatagagcagattggaaaaactgttttgtacaattttcaagtggatacttggacagctttgaggccttcgctggaaacgggtatatcttcacataaaaactagaccaaagcattctcagaaacttctttgtgatgctttcattcaactcatagaggggaacattcctgttcataaagcagttttgaaaccacctttttgtagaatctgtaagaggaaaattagagcgccttgaggcctatggtgaaaaaggaaataccttcccataaaaaatagacagaagaattctcagaaactactatgtgatgtgtgtactcaactcacagatttgaactcttcttttgatagagcagttttaaaacactcttttgtagaatttgcaaggggataattggatagctttgaggatttcgttgtaaacgggaatatcttcagataaaaactagacagaagcattcgcagaaaatactttgtgatgtttgcattcaactcacagagcagaatattccctttcatggagcagttttgaaacactctttttgaagtaactggaagtggacatttggagcgctttcacacctatggtgaaaaaggaaatattttcatataaaactagagaaaagtattatcagaaacttctttgtgatgtgtgtactcaactcacagagttgaacatttcttttgatgcagcagttttgaaacactctttttgtagaatctgcaagtggatatatggagagcttagaggctttcattggaaacggaaatatcttcatatacaatttagacagaagcattctcagaaacttctttgtgatgtttgcattcaagtcacagagttgaacattccctttcatagagcaggttggaaacattctttttgtagatctgtaagttgaaacttggagcactttgtggcctatggtgaaaaaggaaatatcttcacataaaaagcagacagaaacattcttagaaacttctttgtgatgtttggattcaactcacagagttgaacattccttttcatagagcagttttgaaaaactctttttgcagaatctgcaagtggacgtttggagtgatttgagacctatggtgaaaaaggaaatatcttcacacaaaaagtacacagaagcattttcagaaactactttgtgatgtgtttactcaactcacagagttaaaactttcctttgatacagcagttttgaaaaacccttctcgtagaatttacatgtggatattaagacagcactgaggatttcgctggaaacggcaatatcttcacataaaactagacagaagctttcttagaaagttcttagtgatgtgtgcattcaacttacagagttgaaactttcttttgatagagcagattggaaacaccattttttagaatttgcaagtggatatttggaaagctttgaggccttggctggaaacgggtatatcttcacataaaaactagacagaagcattctcagaaacttctttgtgatgtttgcattgaactcacagaattgaacactccctttcatagagcagttttgaaatactctatttgtagtatttgcaagaggatatttggatagatttgaggctttcactggaaacggaatatcttcacataaaaattagacagaggcattctcagaaacttctttgtgatgtgtatactcaactcacagagttgaaactttcttttgatagagaagactggaaacactctttttgtggaatttgcaagtggatatttggacggctttgtgtacttcgctggaaacgggtatattttcacataaaaactagacagaagcattctcagaaactaccttgtgatgcttgcattcaacacagagttgaacattccttttcatagagcagttttgaaacattctttttgtagaatctctaattggaaacttggagcgctttgaggcctatggtgaaaaaggaaatatcttcccgtaaaaaagagacagaagaattctcaaaaacttctcagtgatgtgtgtactcatctcactgagttgaatttttcttttgatagagcagttttgaaacactctttttgtagaatctgcaagtggatatttggaaaactttgaggccttcgctggaaacgggaatatcttcacataaaaagtatacggaagcattaccagaaatttcttagagatgtttgcattcaactcacagagatgaatattccctttcacagagcagtattgaaacattctttttgtagaatccgtaagtagatattaggatagatttgaggctttcattgaaaacgggaatatcttcacttaaaaacgagactgatgcatactcagaaacttctttgtgaggtttgcattcaactcacagatttcaacattctgtttcatagataagtttagaaacgctctttttgtagtatctggaagtggacatttggagtgctttgaggcctatggtgaaaaaggaaatagcttcacataaaaactagaaagaagcattctcagaaacttctatgttatgcttccattcaattcaaagagttgaacattccttttcatagagcacttttgaaacactctttttgaaaaatctgtaagtggaatcttggagcgatttgaggcctatgctgaaaaaggaagtatcttaacataaaaactagacagaagaattctcagaaacttctttgtgatgtgtgtactcaactcacagagttaaacctttcctttgatatagcaggtttgaaacattctttttgtagaatttacaagtggatattaggactgcattgaagattccgttgtaaacgggaatatcttcacataaaactagactgaagcattcttagaaacttctttgtgatgtatgcattcaactcacagagttgaaactttcttttgatagagcagattggaaacactctgtttgtagaatttgcaagaggatatttggacagctttgagaccttccctggaaacgggtatatcttcacataaaaacaagacagaaacgttctcagaaactttttgtgatgcttgtattcaactcacagagtttaatattccttttcaaagagcagttttgaaacactctttttgtagaatctgtaagaggaaacttggagggctttgaggccaaaggtgaaaaaggaaatatcttcccataaaaactagacagaggaattctcagaaactcgtttgtgttgtgtgtactcaactcacagatttgaagttttcttttgatagagcagttatgaaacactgtttttatagaaactgcaagtggatatttgtatagctttgaggatttcgttggaaacgggaatatcttcacaagaaaactgcacagaagtattctcagaaacttccttgtgatgtttgcattcaattcaccgtgttgaacattctctttcatagagcggttttgaaacactctttttgtagtatctggaagtgcacatttggagcgatttgaggactatgtagaaaaaacaaatatcttcacataaaaactagacagaagcattcgcagaaccttctttgtgatgtgtgtactcaactcgcagagttgaacatttcctttgatacagcagttttgaaatactcttttgcagtatctggaagtagacatttggagtgctttgggacctatggtgaaaaaggaattatcttcacataaaaactagacagaagaattctcagaaacttttgtgatgtgtgtactcagctcacagggttgaacctttcttttgatacagtagttttgaaacattctttttgtaggatctgcaagtggatgtttagatagctttgagaccttcgttgtaaacgggaatatcttcagaaaattctcagaaaatttttgtgatgtttgcattcaagtcacagagttgaacattccttttcatagagcagttttgaaacactctttttgtagaatctgaaatgggacatttagcgcgatttgaaacctatggtgaaaaagggaatatcttcacataaaaaatagacagaagaattctcagaaactaatttctgatgtgtgtactcagctcaaagagttaaacctgtcctttgatacagcagctttgaagcactcttcttgtagaatttacaagtgcatattagaacagcattgaggatttcgttggaaacgggaatatcttcacataaaactagacagaagcattctcaaaaacttctttgggatttgtgtcttcacttaacagagttgaaactttcttttgatagagcagattggaaacactcttttgtagaatttgcaagtggatatttggacagctttgagaccttcgctggaaacgggtatatctccacataaaaactagacagaagcattctcagaaacttctttgtgatgcttgcattcaactcacaagtttaaacgttcctttttttagagcagttttgaaacactcattttgaagaatctgtaagaggaaaattggagcgctttgaggcctaaggtgaaaaaggaaatatcttcccataaaagctagacagaggaattctcacaaaatcatttgtgatgtgtgtattcaactcacagagttgaactttccttttgatagaggagttttgaaacactgtttttgtagaaactgcaagtggatatttgtatatctttgaggatttcgttgtaaacggatatatcttcacataaaaactagagagaagcattctcagaaacttctttgtgatgctttcattcaactcacagagatgaacattccctttcatagagcagttttgaaacactctttttgtagtatctggaagtgatcatttggagcactttgaggcctatagtgaaaaacgaaatatcttcacannnnnnnnnnnnnnnnnnnnnnnnnaagcattctcaaaaccttctttgtgatatgtgtacttaactcacagagttgaacatttcttttgatacagcagtttttaaacactctttttgtagaatctgcaagtgggtatttggatagatttcaggatttcattggaaacgggaatatcttcccataaaaactagacagaagcattctcagaaacttctttgtgatgtttgcattcaactcacagagttgaaaaatccttttaatagagcagttttgaaacactctttttgaagtatctgtaagtggaaactcagagcactttgaggcctatgttgaaattggaaataacttcccataaaaaatagacagaaaaattcccagaaacttctttgtgatgtgtgtactcaactcgcagagttgaccttttcttttcatagagcagttttgaaacactctttttgtagagtgtgcaattagatattaatatatcattgaggatttcactggaaacgggaatatcttcacataaaaactagacagaagcattctcagaaacttcgttgtgatgcttgcattgaactcagagagttgaacattacttttcatagaactgttctaaaaccctctttttgaagaatctgtaagtggcaacttggagcgctttgaggcctaggctgaaaaaggaaatatatttacataaaaactagacagaagcattctaagaaacttctttgtgatgtgtgtactcaacttacagagttgaacctttcttttgatacagcagttttgaaacactttttttgtaaaatctgcaagtggatacttggatagttatgaggctttcgttggaaacgagaataacttcaggtaaaaactagacagaagcattctcagaaacttctttgtgatgtttccattcaactaacggagttgaacattccttttcatagagcagttttgaaacactctttttgtagaatctgtaattggaaacttggagagctttgaggtctaaggtgaaaaatgaagtatcttcccataaaaaccatacagaagaattatcagaaacttctttgtgatgtgtgtactcaactcagagcgttgaacttttcttttgatggagcagttttgaaacactctttttgtaaagtctgcaagtggatatttggataccttttaggatttctttggaaacggggatgtcttctcataaaaactagacagaagctttctcagaaacttctctgggaagtttgcattcaacaaatagagttgaacattccctttcatagagcagttttgaaacactctttgtagtatctggaagtggacatttggagcgctttgaggcctatggtgaaaaaggcgaaatcttcacgtaaaaattagacagaagcattctcagaaacttgtttgacgtgtgtgtactcagctcacagagttgaacttttcttttgatacagcagttttgaaacactctttttgtagaatctgcaagtggatatttgaataactttgaggctttcgttggaaacgggaatatcttcacataaaaagtagacagaagcattctcagaaacttctttgtgatgcttgcatttaactcacagagttgaacattccttttcatagatcagttttgacacactctttttgaaaaatctgtaggtggaaacttggagcgttttgaggcctatggtgcaaaaggaaatatcttaccataaaaactaaacagaagaattctcagaaacttattttagatgtgtgtactaaactcaaaaagttgaacttttctttttatagagcagttttgggacactctttttgcacaatctgcaagtgtatattttgatagttttgaggatttccttgtaaatggaaatatctccacgtaaaaactagacagaagcattctcagaaattactttgtgatgcttgaattcaactcaccgagttgaacattccctttcatagagcacttttgaaacactctttttgtggtatctggaagtggacatttggagtgcttttgaggcctgtggtgaaaaagggaatatcttcccataaaaactagacagaagcattctcggaaacttctttgtgatgtgtgtactcatctcacagagttgaaccttccttttgatacagcagttatgaaacactccttttgaagaatccgcaagtggatatttgtatagatttgaggctttcattgaaaatggggatatcttcacataaaaactagacagaagcattctcggaaatttctttgtgatgcttgcattcaacacacggagttaaaccctcgttttcatagagcagttttgaaacactctttctgaagaatctgtaggtggaaacttgaagcgctttgaggcctatggtggaaaaggaaatatcttaccttaaaaactagacagaagaattctcagaaacttctttgtgatgtgtgtactcaactcacagagttgaacgtttcttttgatagaggagttttgaaacactctttttgtagactctgcaagtggatatgtggattgctatatggatttggccggaaacgggaatatcctcgcttaaaaactagatagaagcattctcaaaaacttccttttgacatttgcgttcaactcacagagttgaacatttcctttcatagagcagtttggaaaaactctttttgtagaatctggaagtggacttttggagggatttgagacctgtggtgaaaaaggaaacatcttcacataaaatgaagacagaaggattctcagaaactactttgtgatgcgtgtactcaaatcacagtgttaaacatttcttttgatacagcagttttgaaacactcattttattgaatccgtaaggggatattttgacagatttgagaccttcgctggaaatggttatatcttcacataaaaactagacagaagcattctcagaaacttctttgtgatgtttgaattcaagtcacagagttgaacattccctttcatagagcagttttgaaacactctttttgtagtatctggaagtggacattttgagcgctttgaagcctacggtgaaaaaaaagtcttcacataaaaactagacaggagcattctcagaaacttctttgtgatgtgtgtactcaactcacagtgttgaaactttcttttgatacagcagttttgaaacactccttttgtagaatctgcaagtggatatttggatacttttgaggctttcgttggaaacgggaatatcttcacataaaaactagaaagaagcattctaggaaacttccttgtgatgtttgcattcaactcacagagttgaacactccttttcatagagcagttttgaaacactatttttcaagaatctgcacgtggacatttggagcgatttgagacatatggtgaaaaaggaaatatcttcacataaaaagcagacaggagaattctcagaaacttctttgtgatgtgtgcactcaactcacagagatgaatttttcttttgatggagcagatttgaaacactctttttggagaatctgcaagtggatatttggatagctttgaggatttcgttggaagtgataatatcttcttataaaatctagacagaagcattctcagaaacttctatatgatgtttgcattcatgtcacagagatgaacattccctttcatagggcagttttgaaacactcttttgtagtgtatggaagtggacattttgagcgctttgaggcatatggtgaaaaacgaaatattttcacataaaaactagacaggagcactctcagaaactcctttgtggtgtgtgtactcaactcacagagttgaacctttcctttgatacagtagttttgaaacactctttttgtagaatctgcaagtggatatttggatagctttgtgcatttcattggaaacgggaatacctttacagaaaaactagtgagagtcatacgcagaaacatctttgtgatgtttgcattctactcacagagttgaagattccttttcatagagcagttttgaaacactctttttgaaggatcttcaagtggatattttaagcgatttgagacctatggtgaaaaaggaaatatcttcacataaaaacagacagaaaccttctcttaaaatgctttgtgatgtgtgtactcaactcacagcattaaacatttcctttgatagagcagtttgggaacactcttcttgtagaatttagaagtggatattaggacagcattgaggattgcgttgcaaacgggaatatcttcacataaaactagacagaagcattctcagaaactactttgtgatgtgtgcattcaacttgaagagctgaaactttcttttgatagagtaggttggaaacactctttttgtagaatttgcaagtggatctttggacagctttgaggactttgctggaagtatgtatatcgtcacataaaaactagatagaagcattctcagaaatttatttgtgttgcttgcattcaactcacagtgttgaacattccttttcgtagagcagttttgaaacactctttttgtaggatctgtaagtggaaacttggagcacttcgaggcctatggtgaaaaaggaaactagacagaagaattctcagaaacttttttgtgatgtgtgtactcaactcacagagttgaacttttcttttgatagagcagttttgaaacgctgtttttgtagtatctgcaagtggttatttggatagatttgaggatttcgttggaaaagggaatatcttcacataaaaactagacagaagcattctcagaaactactttgtgatgtttccattcaagtcacagaggtgcacattcctcttcatagagcagttttgaaacaatctttttgtagtatctggaagtggacatttggagcgctttgaggcctatgttgaaaaaggaaatatcttcccataaaactagacagaagcattctcagaaacttgtttgtgatgtgtgtactcaactcacagagttgaacctttcttttgatacagcagttttgaagcactctttttgtagaatctgccagtggatatttggatagctttgaggatttcgttgtaaacaggaatatcttcatataaaaactagacagaagcattcccagaaacttctttgtgatgattccattcaagtcatagtgttgaacattcccttttgtagagcagtttccaaacactctctttgtagtatctggaagtggacttttggagcgctttggggccaatggtgaaaaaggaaatatcttcccataaaaactagacagaagcattctcagaaacttgtttgtgatgtgtgccctctactaacagagttgaacctttcttttcatagagcagtttgaaacactctttttgtagaatctgcaggaggatatttgcatagctttgaggatttcgttggaaacgggattgtcttcagataaaatccagacagaagcattctcagaaacttctttgggatgtttgcattcaagtcacagaggagaacattccctttcgtagagaaggtttgaaacactctttttgtagtatctggaagtggacatttggagcgcttagaggcctatggtgaaaaaccaaatatcttcacataaaaactatacaggagcattctgagaaacttctttgtgatgtctgtactcaactcacagagttgaacctttcttttcatacagcagttttgaaaccctctttttgtagaatctgcaagtggatatttgcatagctttaaggcttttgttggaaatgtgaatatcttcacttaaaaattagagagaagaattcccggaaacttctttgtgttgtttgcattcaactcgcagagttgaacattccttttcatagagcagttttgaaacactctttttcaagaatctgcacgtgtacatttggagtgatttgagacctatgaagaaaaatgaaatatctatcttcacataaaaagcagacacaaacattctcagaaactactttgtgatatgtgtactcaactcacagagttaaaaatttcctttgatacagcagttttgaaacactctccttgtagaatttacaagtggatattaagacagcgttgaagatatcgttggaaacgggaatatcttcacatacaattagacagaagcagtctcagaaacttctttgtgatgtgtgcattcatctcacagagtggaaactttctttcaatagagcagattggaaacaatctttttgtagtatttgcaagtggatatttgcatatttgcacagctttgtgacctttgctgaaacgagtatatcttcacataaaagctagacagaagcattctctgaaacttcattgtgatgcttgcattcaactcacattgttgaacattccttttcatagagcagtttttaaacactctctttcttgaatcagtaagtggaaaataggagcgctttgaggcctatggtgaaaaaggaaacatcttctcataaaaactagagagaagaattctcagaaactcctttgtaatgtgtatactcaactcacagagttttactttgcttttgatagagaagttttgaaacactcttattgtagaatctgcaagtggatatttggatagctttgaggatttcgttgtaaacgggaatatcttcacatcaaaactagacagaagcattctcagaaacgactttgtgatgtttccattgaagtcacagagttgaacattccctttcatagagcagttttgaaatactctttttgtagtatctggaagtctacatttgaggcgctttgaagcctacggtgaaaaaggaaatatcttcccataaaaactagacagaagcattctcagagacttgtttgtgatgtgtgttctcaaaaaacagggttgaacctttcttttgatcgagcagttttgaaacactgtttttgtagaatctgccaatggatatttggatagctttgaggatttcactggaaacgggaatatcttcatatgaaatctagacagaagcattctcagaaacttctttgtgatgtttgcattcaactcacagagtttaacattcccattcattgagcagtttggaaacactctttctgcagtatctggaagtggatatttggagcgctttgaagcctatggtgaaaaaccaaatatcttcacataaaaactacacaggagcattctcagaaacttctttgtgatgtgtgtactcaactcacagagttgaacctttcttttgatacagcacatttaaagcactccttttgtagaatctgcaagtggatatttggatagctttgagtcttcgttggaaaaggggatatcttcacataaaactagagagaaggactcccggaaaaatctttgtgatgtttgcattcaactcacagagttgaacattcctttccgtagagcagttttgaaacactctttttgaagaatctgcacgtggacatttgtagcgatatgagacctatggtgaaaaaagaaatatcttcccataaaaagcagacagaaatattctcggaaacttctttgtgatgtgtgtactcaactaacagagttgaaactttcttttgataaagcagtttgaaacactcttttattgaatccgcaaggggatatttgtatagctttgaggctttcgttggaaacgggaatatcttcacataaaaagtagacagtagcattctcagaaacttctttgtgatgcttgcattcaacttaaagagttaaatattccttttcatagagcagttatgaaacactctttttctagaatctgtaggtggaaacttggagcgctttgaggcctatggtcaaaatggaaatatcttcccataaaaaataggcagaagaattctcagaaactttgttgggttgtgtgtactcaactcacagagtttaacttttctttttcgtagagcagttttgaaacactgtttttgtagaatctgcaagtggatatttggatagctttgaggatttcgttggatacgggaatatcttcatataaaatctagacagaagcattctgagaaacatctttgtgatgtttgcattcaaggcacagagttgaacatttccttttacagagcaggtttgacacactctttttgtattatctggaagtggacatttggagctgtttgaggcctatcgtgaaaaaggaaatatcttcccataaagactagacagaaacattctcagaaacttgtttgtgatgtgtgttctcaactaacagagttttacctttcttttgacagagcagtttagaaacactctttttgaagaagatgcaagtggatatttggatagctttgaggatttcgttggaaatgggaatatcttcatgtaaaatctagacagaagcattttcagaaacttctttgtgatgtctgcattcaagtcacagagttgaacattccctttcatagagcagatttaaatcagtctttttgaagtatctggaattggacatttggagcgcttttacgcctatggtgaaaaaggaaatatcttcccataaaaaccaagacagaagcattctcagaaacttgtttgggatgtgtatactcaactaacagggttgaaactttcttttgacagagtttgtaaacacactttttgtagaatctgcaagtggatatttggatagctgtgaggatttcgttggaaacgggaatagcttcatataaaatctagatagaagcactctgagaaacaactttgtgatgtgtacattcaagtcacagggttcagcattccctttcacagagcaggtttgaaacactctttctgtaatttctggaagtggacatttcgagcgctttggggcatacagtgaaaaagtaattatcttcccttaaaaaatagatggaaccattcgcagagtcatgtttgtgatatgtgcactcaactaacagagttgaacctttcttttgatagaggacatttgaaacactctttttgtagaatctgcaatggatatttggatagctttgatggtttcgttggaaacgggaatgtcttcatagaaaatctagatggaagcattctcagaaacacctttgtgatgtttgcactcaagtcacagagttgaacattccctttcaaagagcaggtttgaaacactctttctgtagaatctggaagtgggcatttggagcgcttcgaggactatggtgtaagaggaaataacttcccataaaaagtagatagaagcaatctcagaaacttgtttatgatgtgtctaatcatctaaaagagttgaaactttctattgatagagcactttcaaaacattctttttgtggaatccgcaagttgatattttgatagctttgaggatttctttggaaacaggaataacgaaatataaaatctagactgaagcattctcagaaacttctttgtgatgtctgcattcaagtcacaaagttgaacattccctttcagagagcacgtttaaaacaccctttttgtagtatctggaagtgcacatttggagcgctttgatgcatatggtgaaaaaggaaatatcttcccatgaaaactagacagaagcattctaaaaacttctttatgttgtatatattcaactaacagagttgaacctctctgttgatagagcagttttgaaacactctttttggagaatctgcaagtggatatttggagagctttgaggatttcgttggaaactggaatacatataaaaagtagatagcaaaattctcagaaacttctttgtgatgtttgcattcaagttacagagttgaacattttctttcacagagcaggtttgaaacactctttctgtagtatttggaagtggacatttcgagcgctttgagacctacggtggaaaaggaattatcttcccataaaaaatagacagaagcattctcagaatcatgtttgtgatgtgtgtactcaactaacacagttgaacatttcttttgatagagcactttcgaaacactctttttgtagaatctgcaagtggatattttgatagctttgaggatttcgttggaaacgggaatgtcttcatagaaaatctagacagaagcattctcagaaacacctttgtgatgtttgcattcatgtcacagatttgaacattccctttcatagagcaggtttgaaacacactttttgtagtatctggaagtggacatttggagtgcttcaaggcctatggtgaaaaaggagatatcttcccataaaaactagacagaagcaatctcagaaacttgtttatgatgtatctaaaaatctaacagagttgaaattttctattgacagagcgcttttgaaacactctttttgaggaatctgcaaatggatatttggacagctttcaggttttcgttggaaaccggtttctcttcatagaaaatctagacagaagcattctcagaaacacctttgtgatgtttgccttcatgtcacacagttgaacatactctttcatagatcagatttgagccaccatttttgtaatatcttgaagtggacatttcgtgaactttgaggtctatggtgaaaaaggaaatatcttcccataaaaaggagatagaaacaatctcagaaacgtgtttatgatggatatacacaactaacagagttgaacctttctattgattgagccgatttgaaacacactttttgtggaatctgcaagtggatatctagatagctttgacgatttcgttggaaatgggcatacatataaaaagtagacaacaacattgtcagaaacttctttgtgatgtttgaattcaagtcacagagatgaacattccctttcatagagcaggtttgaaacactaattttgtagtatctgaaagtggacatttggagcgctttccggcctaaggtgaaaaaggaaatatcttcccataaaaactagacagaagcattctcagaaacatatttgtgatatgtgtcgtgaactaacagagttgaacctttcttttgacagagcagttttgaaaaattctttttgtataatctgctagtcgatatttggatagctttgaggatttcgttggaaacgggaatttcttcatgtaaaatattgacagaagtattcagagcaacatctttgtgatgtttccattcaagtcacagagttgaacattccctttcatagagcaggtttaaaacactctttttgtggtatctggaagtggacatttagagcgctttgaggcctattgtgaaaaaggaaatatcttcccataaaaactagacagaagcattcttagaatcatgtttgtgatgtgtgtactcaactaacagagttgacccttccttttgatagagcactattgaaacactctttttgtagaatctgcaagtggatatttggatagctttgaggatttcgctgtaaacgggaatgtcttcatagaaaatctagaaagatgcattctaagaaacttctttgtgatgtctacattcaagtcacagatttcaacattccctttcttagagcaggtttgaagcactctttttttttttagtatgtggaagtggatatttggagaactttgaggcctatggggaaaaaggaaatatcttcccataaaaactagacagaagcatgctcagaatcacgtttgtgttgtgtgtactcaacgaacagagttgaagctttcttttgatagagcacttttgaaacactctttttgtagaatctgcaagtggatatgtggatagctttgaggatttcgttggaaacgggaatatctacatacaaaatctagacagaagcattcccggaaacacctttgggatgtttgcattcaagtcacagagttgaacattccctttcatagagcaggtttgaaacaatctttttgtagtatctggaagtggacatttggagcgctttctggcctatggtgcaaaaggatatatcttccgaaaaaaactagttagaaccaatctcagaaacttgttaatgatatatctactcaactaatatagttgaagctttctattgatagagcagttttgaaacactctttttgtggaatctgcaatggatatttggatagctttgaggttttcgttggaaacgggaataaataaaaaatagacaacagcaatctcagaaacttctttgtgatgtttacattcaagtcaaagagttgaacattccctttcatagagcaggtttgaaacactcattttgaagtatctggaagtggacgtttgtagcgcttccaagcctatggtgaaaaaggaaatatcttcccctaaaagctagtcagaagcattctcacaaagttgttggtgatgtttgtactcaactaagagagttcaaactttcttttgacagaggagtttcgaaaccctttttttgtagaagctgcaaatggatattttgatagctttgaggatttcgatggaaacgggcatatcttcttataaaatctagaaagaagcattctcagaaacatctttctaatgtctgcattcaagtcacagagttgaatgttccctttcatagagcaggtttgaaacacaataattgtactatgtggaagtggacatttggagggctttgaagcctatggtcaaaaaggaaatatcttcccataaaaactagacagaaccattctcataaacatatttttgatgtctgtcctcaactaacagacttgaaactttcttttgctacagcagttttgaaacactctttttggagattctgcaagtggatatttcaatagctttgaggatttcgttggaaacgggaatacacataaaaattagacagcagcattctcagaaacatctttgtgatctttgcattcaagtcacagatttgaaaattccccttcatagagcaggtttgaaaatctctttttgtagtatatggaagtggacatttggagcgcttccaagcttatggtgaaaaaggaaatatcttcccctaaaaactagaccgaagcattctcagaaacatgtttgtgatgtgtgtattcaactaactgatttgaacctttcttttgatacagtaattgcgaaaccctcttttttgtagaagctgcaagtggatattcggatggctttgaggatttcgatggaaatgggcatatcttcatagaaatccagacagaagcattctcagaaacttctttgtgatgtctgcattcaagtcacagagttgaacgttccgtttcatagagcaggtttgaaacacatttttgtactatctggaagtgcatatttgtagcgttatgaagcctatggtgaaaaaggaaatatcttcccatgaaaactagacagaagcattctcagaaacttgtgtgtcatgtgtgttctcaactaacagtgttgaatcttccttttgatagaagagttttgaaacactctttttgtagaatctgcaagtggatatttggatagatttgaggattgcgttgtaaacggtaatatcttcatatacaatcctgacagaagaattctgagaaaatctttgtgatgtttccattcaagtcacagagttgaacattccctttcatagggcaggtttgaaacactccttttgtaggatctgggagtggacatttgtagcgctttcaggactatgttggaaaaggaaatatcttcccataaaaactagacagaaacattctcagaaagttgtttgtgatgtgtgtactcaactaacagagttgaacctatcttttgatagaccacttttgaaacactcttttcgtagtatctgcaagtggatatttggatagctttgaggatatcgttggaaacgggaatatcttcatataaaatctagacagaaacattctgagaaacatctttgtgaagattccattcaagtcacagagttgaacattctctttcacagagcaggtttgaaacactctttttgtagtgtctgaaagtggacaattagagcgctttgaggtctatgctgaaaaaggaaatatcttccaataaaaactagatagaagcattctctgaatcatgtttgtgatgtgggtcctcaacaaacagagctgaacctttcttttcatagatcagttttgaaacactctttttgtagaacctgcaagtggatatttggatagatttgagcatttcgtggaaacgggaataacgtcatataaaatctagacagaagcattctcagaaacttccttgtgatgtttgcattcaagtcacagagttgaacattccccttcatagagcaggtttgaaaaactctttttgtagtatgtggaagtggacatttggagcgctttcaggcctacgggaaaaaggaaatatcttccaataaaaactagacagaagcattctcagaaacttatttttgaagtgtgtcctcaactaacagagttgaactattcttttgatagaggagttttgaaacaccctttttgtagaatctgcaagtggatatttggatagctttgaggatttcgttggaaacgggaatatcttcatataaaatctagacagaagtatgctcagaaacttctttgcgatgtttgaattcaagtcaccgagttgaacattccttttcatagagcaggcttcaaacactctttttctagtatctggaagtggacatttggagagctttcaagcctaaggtgataaagtaaatatcttcccataaaaattagacagaagcactcttataaacttatttgtgatctatgtcctcaactaacagacttgaacatttcttttgaaagagcagttttgaagcactctttttgtggaatctccaagtggataattggcgaactttgaggagatcattggaaacggtaatgtcttcataaaaatctagaaagaaggattctcggaaacgtctttgtgatgtttacattcaagtcacagatttgaacattccctttcaaagagcaggtttgaaacactctttctctaatatctggaagtggacatttggagcgctttcaggcctatggtgaaaaaggaaatatcttcccataaaaactagacagaaatattctcagaaactactttgtgatgtgtgtactcaactaacagagttgaaccattcttttgtcagagcagttttgaaaaactctttttgtaaaatctgcaagtcaatatttggctagctttgaggatttcattggaaacgggaatatatatacaactagacagcagcattgtcagaaacttctttgtgatgtttgcattcaagtcatagagttgaacattccctttcatagagcaagtttgatacactctttttgtagtatctggaagtggtcatttagagcgctctgaagcctttggtgaaaagataaatatcttctcacaaaactagataaaagcaatctcagaaactgatttatgatgtatctactcaactaacagatttgaacctttctctggatagagcagttttgaaaccctctttgtgtggaatctgcaagtggatatttggctagttttgaggatttcgttggaaaaaggaatgtcttcctatataatctagacagaaggattctaggaaacttctttgtgatgtttccattcaagtcacagtgttgaacattccttttcattgagtagacttgaaacactctttttctactatctggaagtggccatttggagcgctttcaagcctaaggtgataaagtaaatatcttcccataaaaactagacagaaacattctcattaactaatttctgatgtgtgtcctcaactaggtgacttgaacataacttttgatacagcagttttgaaacactctttttgtggaatctgcaactggatatttggctggcaatgaggatttcgctggaaacgggaatacataaaaaagcagacaannnnnnnnnnnnnnnnnnnnnnnnnnnnnnnnnnnnnnnnnnnnnnnnnnnnnnnnnnnnnnnnnnnnnnnnnnnnnnnnnnnnnnnnnnnnnnnnnnnnnnnnnnnnnnnnnnnnnnnnnnnnnnnnnnnnnnnnnnnnnnnnnnnnnnnnnnnnnnnnnnnnnnnnnnnnnnnnnnnnnnnnnnnnnnnnnnnnnnnnnnnnnnnnnnnnnnnnnnnnnnnnnnnnnnnnnnnnnnnnnnnnnnnnnnnnnnnnnnnnnnnnnnnnnnnnnnnnnnnnnnnnnnnnnnnnnnnnnnnnnnnnnnnnnnnnnnnnnnnnnnnnnnnnnnnnnnnnnnnnnnnnnnnnnnnnnnnnnnnnnnnnnnnnnnnnnnnnnnnnnnnnnnnnnnnnnnnnnnnnnnnnnnnnnnnnnnnnnnnnnnnnnnnnnnnnnnnnnnnnnnnnnnnnnnnnnnnnnnnnnnnnnnnnnnnnnnnnnnnnnnnnnnnnnnnnnnnnnnnnnnnnnnnnnnnnnnnnnnnnnnnnnnnnnnnnnnnnnnnnnnnnnnnnnnnnnnnnnnnnnnnnnnnnnnnnnnnnnnnnnnnnnnnnnnnnnnnnnnnnnnnnnnnnnnnnnnnnnnnnnnnnnnnnnnnnnnnnnnnnnnnnnnnnnnnnnnnnnnnnnnnnnnnnnnnnnnnnnnnnnnnnnnnnnnnnnnnnnnnnnnnnnnnnnnnnnnnnnnnnnnnnnnnnnnnnnnnnnnnnnnnnnnnnnnnnnnnnnnnnnnnnnnnnnnnnnnnnnnnnnnnnnnnnnnnnnnnnnnnnnnnnnnnnnnnnnnnnnnnnnnnnnnnnnnnnnnnnnnnnnnnnnnnnnnnnnnnnnnnnnnnnnnnnnnnnnnnnnnnnnnnnnnnnnnnnnnnnnnnnnnnnnnnnnnnnnnnnnnnnnnnnnnnnnnnnnnnnnnnnnnnnnnnnnnnnnnnnnnnnnnnnnnnnnnnnnnnnnnnnnnnnnnnnnnnnnnnnnnnnnnnnnnnnnnnnnnnnnnnnnnnnnnnnnnnnnnnnnnnnnnnnnnnnnnnnnnnnnnnnnnnnnnnnnnnnnnnnnnnnnnnnnnnnnnnnnnnnnnnnnnnnnnnnnnnnnnnnnnnnnnnnnnnnnnnnnnnnnnnnnnnnnnnnnnnnnnnnnnnnnnnnnnnnnnnnnnctaaccgggttgaacatttcttttgagagaggagttttgaaacactctttttgtggaatcttcaagtggatatttggctagctttgaggatttcgttggaaacgggaatacatttaaaaagcagacagcagcattctgagcaacatctttgtgatattttcattcaagtcacagagttgaaaattccctttcatagagcaggtttgaaacactacttttgtagtatccgcaagtggacatttggagcgctttcaggcctatgttgaaaaaggaaatattttcccataaaaactagacagaagcattctcagaaacttgtttatgatgcatctactcaactaacagagttgaacatttctttgatagagcagttttgaaacactctttttgtggaatatccaagaggatatttggctagctttaaggatatcgttggaaacgggaatacatttaaaaagcagacagcagtgttctgagcaacttctttgtgatattttcattcaagtcacagagttgaaaattccctttaatagagccggattgaaacactccttttgtagtatctggaagtggacatttggagcgctttcaggcctatgttgagaaaggtaatatcttcccataaaaactagacagaagcattctcagaaacttatttgtgatgtgtgccctcaactaacagagtttaacatttcttttgatagagtagttttgaaacactccttttgtggaatctgcaactggatatttggctggctatgaggatttcgttggaaacgggaatacatataaaaagcagacagtagcgttctgagaatcttctttgtgatgttgcattcaagtcacagagttgaacattccctttcatagagcaggtttgaaaaactccttttgtcatatctggaagtgtccatttggagctcgttcaggcttgtgttgataaaggatatatcttcccataaaaaccagacagaagcattctcagaaacttatttgttatgtgtgtcctcaactaacagatttgaacatttcttttgagagagcaattttgaaacactctttttgtagaatctgcaaatggatatttggatagctttgaggatttcgttggaaacgggaatatcttcatataaaatctagacagaagcattctcagaaacttccttgtgatggttgcattcaagtcatggagttgaacattcgctttcatagagcaggttggaaacactctttttccattccctggaagtggacatttggagcgctttgaggcctatggtgaaaaaggaaatgtcttcccataaaaacaagatagaagcattctcagaaacttattcgtgctgtgtgtcctcaactaacagagtagaacctttcttttgatagagcagttttgaaacactctttttgtagaatctgcaagtggacatttggatagctttgaggatttcgttggaaacgggaatatcttcacatgaaatctagacagaagcattctcagaaatttctttgcgatgtttgcattcaagtcacagagttgaacattccttttcatagagcaggcatgaaacactctttttctactatctggaagtggacatttggagctctttcaagcctatggtgacaaagtaaatatcttcccataaaaactagacagaagcactctcagaaacttattagtgatgtgtgtcctcacataacaggcttgaacatttcttttgacacagcagttttgaagcactctttttgtggaatctccaagtggatatttggctagctttgaggatttcgttggaaacggtaatgtcttcataaaaaatctagacagaacgtttttcggaaacgacgttctgatgtttgcattcaagtcacagaggtgaatattccctttcatagagcaggtttgaaacactctttttgtagtatctggaagtggacatttggagggctttcaggcctctggtgaaaaagaaaatatcttcccataagaactatacagaaatattctcagaaactactttgtgatgtgtgtactcaactaacagggtggaaccattcttttgacagagcagttttgagacactctttttgtagaatctgcaagaggctgtttggctacctttgaggatctcattggaaatgggaatacatataaaattacacagcagcattgtcagaaacttctttgtgatgtttgcattcaagtcatagatttgaacatttcctttcatagagcaagtttgaaacactcttttggtagtatttggaagtggacatttggagtgctctgaagcctttggtgaaaaaggaaatatcttccatcaaaactagatagaagcaatctcagaaacttatttatgatgtatctactcaactaacagagttgaacctttcttttgatagagcagttttgaaacactgtttttatggaatctgcaagtggatatttggctagttttgaggatatcgttggaaaaggcgatacatataaaaagcagattgcagcggcctgagaatcttctttgtgatgtttgcattcaagtcacagagttgaacattccctttcatcgagcaggtttgaaacactccttttatactatctggaagtggacatttggagcgcattcaggccaaagttgaaaacggaaatatcttcccataaaaactagacagaagcattctcagaaacgtatttgtgatgagtaccctcaacaaactgagttgaacttttcttttgatagagcagttttgaaacactcattttgtagaatctgctagtggatatttggatagattgaggatttcgttggaaacgggaataccttcataaaaaatctagacagaagcattctcagaaacttccttgtgatgtttccattcaagtcacagagttgaacattccccttcatagcaggtttgaaacactctttttgtagtatctggaagtggacctttggagcgctttcaggcctatggtgaaaaagggaatatcttcccataaaaactagagagaagcattctcagaaatttattcgtgatctgtttcctcaactaacagagttgaacctttattttcatagagcagttttgaaacactctttttgcagtgtctgcaagtggatatttggatagtttgaggatttcgttggaaacgggaatatcttcatataaaatctagacagaagcaatctcagaaacttccttgtaatgtttgcattcaagtcacggaattcaacattccctttcatacagcaggtttgaaacactcttttgtagaatcaggaagtggacatttgtagcgctttcaggcctgtgggaaaaagaaatatcttcccataaaaactagacagaaacattctcagaaacttatttctgatgtgtgtactcaactaacagagttgaacctttgttttgacagagcagttttcaaactctctttttgtacaatctgcaagtgaatatttggctaggtttgtggatttcgttggaaacgggaatacatataaaaagcagataacagcgttctgagaatcttctttgtgatgtttgcattcaagtcacagagctgaacactccctttcatagagcaggtttgaaacactccttttgtagtatctgaaaatggacatttggaacgctttccgacctaaggtgaaaaaggaaatatcttcctataaaaactagacagaagcattctctgaaactagtttatgatgcatctactcaactaacagagttgaacatttcatttgatagagcagttttgaaacactctttttgtggaatctccaagtggatatttggctagctttgaggatttcgttggatacgggaatacatttaaaaagcagacagcagcgttctgagcaaattatttgtgatattttcattcaagtcacagagttgaaaattccctttcatagaggaggtttgaaacactccttttgtagtatctggaagtggacatttggagcgctttcaggcctatgttgaaaaaggaaatatcttcccataaaaactagacagaagcattctcagaaacttatttgcgatgtgtgccctcaactaacagagttcaacatttcttttgatagagtagttttgaaacactccttttgtgtaatctgcaactggatatttggctggatttgaggatttcgttggaaacgggaatacatattaaaagcagaaagtagcgttctgagaaaattctttgtgatgtttgcactcaagtcacagagatgaacactccctttcatagagcaggtttgaaacactccttttgtagtatctggaagtggacatttggagcgctttcaggcctatgttgaaaaaagaaatatcttcccataaaaactagacagaagcattctcagaaacttgtttatgatgcatctactcaactaatagagttgaacatttcttttgatagagcagttttgaaacactctttttatggaatctccaagtggatatttggctagctttgaggatttccttggaaatggtaatgtattcatgcaaaacctatacagaaagattctcagaaacgtctttgtgatgtttgcattcaagtcacagagttgaacattccctttcagagagcaggtttgaaacactctttttgttatatgtgaaaatggacatttggagcactttcaggcctaaggtgaaaaaggaaatatcttcccataaaaactagacagaagcattctcagaaatttgtttatgctgtatttactcaactaacagagttgaacctttcttttgatagagcagttttgaaacactctttttgtggaatctgcaaggggatatttggctagctttgagaatttcgttggaaacgggaatacatataaaaagcagattgcagcggtctgagaatctcctttgtgacgtttgcattcaagtaacagagttgaacattccctttcatagagcaggcttgaaacactccttttatagtatctagaagtggacatttggagtgctttcaggcctatgttgaaaaaggaaatatctttccataaaaactagacagaagcattctcagaaacttatttttgatgagtaccttcaactaacagagttgaacctttcttttgatagagctgttttgaaacactctatttgtagaatcagcaagtggatatttggatagctttgaggatttcgttggaaacgggaatatatgtaaaaagcagaaaacagcattctcagaaattactttgtgatgtttgcattcaagtcatagagtagaaaattccctttcatagagcaggtttgaaacactctttttgtagtatctggaagtggatatttggagagctttcaggcctgtgttgaaaaatgaaatattttcccataaaaactagacagaagcattccaacaaactagtttctgatgtgtgtcctcaactaacagagttgaacatttcttttgacagaacagttttgaaacactctttttgtggaatctgaaagtggatatttggatagctttgagaatttctttagaaacgggattacatataaaaagcacacagcagaattctcagaaatttctttgagaagtttgcattcaagtcacagagttgaacattcccttcatagaggaggtatgaaatgttccttctgtagtatctggaagtggatatatggagcgctgtcaggcctatggtaaaaaaggaaatatctttccataaaaactagatagaagcattctcagaaacttatttgtgatgtgtgccctcaactaacagagttgaacatttcttttgagagagcagttttgaaacactctttttgtggaatctccaagtggatatttggctagctttgaggatttcgttggaaacgggaatgtcttcatataagctctagacagaagcattctcagaaacttctttgggatatttcaattcaagtcacagagttgaaaattccctttcatggagctggttttaaacactcttttgtagtatctggaagtggacatttgaagcggtttcaggactacggtgaaaaaggaaatatcttccaataaaaactagatagaagcaatgtcagaaacttttttatcatgtatctactcagctaacagagttgaagttttcttttgagagagcagttttgaaacactatttttctggaatctgcaagtggatactaggccagctttgaagatttcgttggaaaagggaatacatatgaaaagcagacagcagcattctcagaaacttctttgtgatgtttgtattcaagtcacagagttgaacattccctttcatagagcagatttgaaacactctttttgtagtgtttggaagtggacatttggagagatttctggcctaaggtgaaaaaggaaatatcttcccataaaaactagacagaagcattctcaggaacttactcgtgatgtgtgtcctcaactaacagagtagaacgtttcgtttgatagagcagttttgaaacactctttttgtagaatctgcaagtggatatttggatagctgtgaggatttcgttggaaacgggaatatcttcatataaaatctagacagaagcattctcagaaacatccttgtgatggttgcattcaagtcacagagttgaacattccttttcatagagcaggttggaaacactctttttgtagtatctagaagtggacatttggatcgctttcaggcctagggtgaaaaggggaatatcttccaataaaaactagacagaagcattctcagatacttatttgtgatgtgtgtcctcagctaacacagttgaacctttcttttgagagagcagttttgaaacactctttttgtggaatctgcaagtggatatttggctgccattgaggatttcgttggaaacgggcatacatataaaaagcagacagcagctttctgagaaacttctttgtgatgtttgcattgaagtcaaagtgttgaacattccctttcatagagcaggtttgaaacactcctttgtcatatctggaagtgtccatttggagtgaattcaggcttcttttgaaaaaggaaatatcttcccataaaaattagacagtagcattctcagaaacttacttgtgatgtgtttactcaattaacagaattgaacctttgttttgacagagcggttttgaaacactctttttgtggaatctgcaagtggatatttggctagctttgtggatttcgttggaaacgggaatacatataaaaagcagacagcagcgttctgagaaacatgtttgtgatgtttgtattcaagtcacagagttgatcattccctttcatagagcaggtttgaaacactccgtttgctgtatctggaagtggacacttggagcgctttcaggcctatgttgagaaaggtaatatcttcccatgaaaactagacaaaagcattctcagaaacttgtttgtgatatgtgccctctactaacagagttgaacctttcttttcatagagcagttttcaaacactctttttgtagaatctgcatgaggatatttggctagctttgaggatttcgttggaaaagggaatacatataaaaagcagattgcagcagtctgagaatctactttgtgacgtttgcattcaagtaacagagttgaacattccatttcatagagcaggtttgaaacactccttttatagtatctagaagtggacatttggagtgctttcagacatatgttgaaaaaggaaatatcttcccataaaaagtagacagaagaattctcagaaagttatttgtgatgagtgccctcaactaacagagttgaatctttcttttgatagagcagttttgaaacacttttttgcagaatctgcaaaaaagcagatatttggatagctttgaagatttcgttggaaacgtgaatatatgtaaaaagcagaaaatagaattctcaaaaacttctttgtgatgtttgcactcaagtcacagagtagaacattccctttcatagagcaggtttgaaacactttttcaatcatctggaagtggacatttgtagcgctttcaggcctatggcgaaaaaggaaatatcttccaataaaaactagacagaagcattctcagaaatttatttgtgatgtgtgtcctgaactaacagagttgagcatttcttttgagagagcagtttacaaacactctttttgtgtaatctgcaagtggatatttggctggctctgaggatttcgttggatatgggaatacatataaaatcagacagcagtgttctgagaaactactttgtgatgtttgaatttaagtcacagaattgaacattccctctcatagagaaggtataaaacacttcatctgtcatatctggaagtatccatttggagcgtattcaggcttgtgttgaaaaagaaaatatcttaccataaaaactagacagaatcattctcagaaacttatttgtgatgggtgtactcaactaacagaattgaactttgttttgacagaacagttttgaaaaagtctttttgtggaatctgcaagtggatatttcgctagatttgtggaattcgttggaatcgggaatccatataaaaagcagacaacagcgttctgagaaacttctttgtgatgtttgcattcaagtcacagagttcaacactacctttcgtagagcaggtttgaaacactctttttgtagtatctggaagtggacatttggagcgctttcagggctaaggtgaaaaacgaaatatagtcccataaaaactagacagaagcattctcagaaacttgtttatgatgtatctactcaactaacaaagttaaaattttctattgatagagcagttctgaaacactctttttgtggaatctgcaattggatatttggctagctgtgaggatttctttggaagcgggaatacatataaaatgcagactgcagcgttctgagaaatatctttgtgatatttgtattcaagtcaccgagttgaacattccccttcataaagcaggtttgaaacactccttttgtagtatctggaagtggacatttggagcgcttataggcctatgttgaaaaaggaaatatcttcccctaacaactagacagaagcattctcagaagcttattcgtgatgtgtgtcctcaactaacagagttgaaactttcttttcatagagcagttttgaaacactctttttgtagaatctacaagtggatatttggatagatttgaggttttcgttggaaacgggagtatcttcgtataaaatctagacagaagcattctcagaaacttccttgtgatggttgcattcaagtcacagagttgaacattccctttcatagagcaagtttgaaacactcctttgtagtatctggaagtggacatttggatctctttcagccctacaggaaaacggaaataacttcccataaaaactagacagaagcattctcagaaacttatttgtgatgtgtgccctcaactaacagagttgaagcattcttttgatagagcagtttagaagcactctttttgtagaatctgcaagtggatatttggatagatttgaggatttcgtaggaaacgggaatatcttcatataaaatctatacagaagcattctcagaaacatctttgtgatgtttgcattcaagtcacagagttgaacattctttttcatagagaaggtttgaaacactttttctaccatctggaagtggacatttggagtgctttcaggcctatggtgaaaaaggaaatatcctccaataaaaatcagacagaagctttctcagaaacttatttgtgatgtgtgtcctcaactaacagagttgaatatttcttttgagagagcagttttgaaactctctttttgtggaatctgcaagtggatatttggctagctttgtggatttcgttggaaacgggaatacatataaaaagcagacagcagcgttctgagaaacacttttgtgatatttgtattcaagtcacagagttgaacactccctttcatagagcaggtttgaaacactcctcttgtagtatctggaagtggacaattggagcgctttcaaggctaaggtgaaaaaggaaatatctttccataaaaaatacacagaagtattctcagaaacttgtttatgatatatatactctagtaacaaagttgaacctttcttttgatagagcagttttgaaacactctttttgtagaatctgcaagtggatatttggagaattttgaggatttcgttggaaacgggaatatatataaaaagcagaaaacagcattctcagaaacttctttgtgatttttgcattcaagtcacagagtagaacattccctttcatagagcaggtttgaaacagtctttttgtagtatctggatgtggacatttggagcgctttcaggtccagggtgcaagaggaaatatcttcccataaaaactagacagaagcgttctcagaaacttatttgtgatgtgtgccctcaactaacagagcagaaactttcttttgatagagcagttttgaaacattcttcttgtaaaatctgcaagacgatatttggatagctttgagaatttcgtttgaaacgggaatgtcttcatataaactctagacagaagcattctcagaaacttctttgggatgtttcaattcaagtcacagagttcaacattccctttcatagagcaggtttgaaacactctttttacatgatctggaagaggatatttggagagctttcaggcgtatagtgaaaaaggaaatatcttccaatataaagtagatagaagcaatgtcagaaacttttttatgatgtgtctactcagctaacagagctgaacatttcttttgatagagcagttttgaaacactctttttgtggaatctgcaagtggaaattcggacagtttgaggatttcgttggtaacgggaatacatataaaaaccagacaaaagcattctcagaaacttatttgtgatgtgtgtcctcaactaacagtgttgaacatttcttttgagacagcagtcttaaaacaattttcttgtggaatctgcaagtggatatatggctcgctttgaggatttcgctggaaatgggaatacatataaaaagcagacagctgcgttttcagaaacttctttgtgatgtttgcattcaagtcacagagttgaaaattccctttcatagcgcaggtttgaaacactccttttgtcatatctggaagtgtccatttgaagcgcattcaggcttgtgttgaaaaaggaaatatcttcctgtaaatattagacagaagcattctcagaaatttatttgtgatgtgtgtactcaactaacagaattgaatctttgttttgatggagcagatttgaaacactctttttttggaatctgcaataggatatttggctagcattgtggatatcgttggaaacgcgaatatacataaaaagcagacagcagcattctgagaaccttctttgtgatgtttgcattcacgtctcagagttgaacactccttttcatagaggaggattgaaacactccttttgtagtatctggacgtggacatttggagcgctttcagggctaaggtgaaaaaggtaatatcttcccataaaaactagacagaagcattctcagaaacttgtttatgatgtattcactcaactaacaaaggtgaacctttgttttgatagagcagttttgaaacactgtttttctacaatctgcagttggatatttggctagctttgaggatttcgttggaagggggaatacatgtaaaatgcagactgcagcgttctgagaaacacctttgtgatgtttgtattcaagtcacacagttgaacattccctttcatagagcaggattgaaacactcgttttgtagtatctggaagtggacatttggagcgctttcaggcctattttgaaaagaggaatatcttcccataaaaacgagacggaagcattctcagaaacttgtttgtgatgtgtgccctctactaacagagttgaacgtttcttttgatagagcagttttgaaacactctttttgtagaatctgcaagaagatatttggatagctttgtgaatttctttggaaacgggaatatcttcatataaaatctagatagaagcattctcagaaacttctttgggatgtttgcattcaagtcacagagttgaacattcccttacatagagcaggtttgaaacactctttttgtagtacctggatgtggacatttggagcgctttcaggcctacggtgaaaaaggaaatatcttccaataaaaactagatagaagcaatgtcagaaactattttttgatgtgtctactcagctaacagagttgaacctttcttttgagagagcagttttgaaacactctttttgtggaatctgcaagtggacattaggtcagctttgagtatttcgttggaaacgggaatacatataaaaagcagacaaaagcattctcagaaacttatttgtgatgagtgccctcaacaaacagtgataaacctttcttttgatagagcagttttgaaacattctttttgtataatctgcaagtggatatttggatagttttgaggatttcgttggaaacgggaatatatgtaaaaagcagaaaacagcattatcagaaacttctttgtgatgtttgcattcaagtcacagagtagaacattccctttcatagagcatgtttgaaacactccttttgtcgtatctggaagtgtccatttggagcgcattctggcttgtgttgaaaaaggaactatcttcccataaaaactagacagaagcattctttgaagcttatttgtgatgtgtgtattcaactaacggaattgaacctttgttttgacgggcagttttgaaacgctctttttgtggaatctgcaagtggatatttggctagctttggggaattctttggaaacgggaatacatataaaaagcagacagcagcgttctgagaaacttctttgtgatgtttgcattcaagtcacagagttgaacactccctttcatagagcaggtttgaaacactccttttgtggtatctggaagtggacatttggagtgatttcagggctgaggtgaaaaaggtaatatcttcccataaaaactagacagaagcattctcagaagcttattcgtgatgtgtgtcctaaactaacagaggtgaaactttcttttcatagagcagttttgaaacactctttttgaagaagatgcaagtggatatttggatagctttgaggatttcgttggaaacgggaatatcttcatgtaaaatctagacagaagcattctcagaaacttccttgtgatggttgcatgcaagtcacagagttgaacattccatttcatagagcaggtctgaaacactcctttgtagtatctagaagtggacatttggatcgcttttaggcctacgggaaaaaggaaatatcttcccataaaaactagacagaagcattctcagaaacttttttgtgatgtgtaccctcaactaacagagttgaacctttcttttgctagagcagttttgaaacactctttttgtagaatctgcaagtggatatttgcatagatttgaggatttcgtaggaaacgggaatatcatcatataaaatctagacagaagaatgttcagaaacttctttgtgatatttgcattcaagtcacagagttgaacattcctcttaatagagcacgcttgaaacactctttttctactatctggatgtggacatttggagcgctttcaggcatatggtgaaaaaggaaatatcttcccataaaagctagacagaagcattctcagaaacttatttgtgatgtgtgtcttcaactaacacagttgaaaatttcttttgtgatagcagttttgaaacagtcttttgtggaatctgcaactggatatttgtctagcttttaggatttcgatgaaaacgggaatacatataaaaagcagattgcagcggtcagagaatctcctttgtgacgtttgcattcaagtaacagagttgaacattccctttcttagagtaggcttgaaacactccgtttatagtatctagaagtggacatttggagtgctttcaggcctttgtgaaaaaggaaatatcttcccataaagactagacagaagcattgtcataaacttatttgtgatgagtgccctcaactaaccaagttgaacctttctttcgatagagcagttttgaaacactctttttgtagaatctgcaatggatattttgatagctttgaggattttgttggaaaggggaatatacgtaaaaagcagaaaacagcattctcagaaacatttttgtgatgtttgcattcaagtcacagagtagaacattccctttcatagagcaggtttgaaacactctttttgtagtatctggaagtggacgttcggagagctttcaggcctatgttgaaaaaggaaatatcttcccataaaaactagaaaaaagcattctcagaaacttgtttgtgatgtgttccctctactaacagagttgaacctgtcttttcatagagcagtttttacaccctctttttgtagaatctgcaagaagatatttggataggtttgaagatttcgttggaaacgggaatgtcttgatagaaaatctagacagaagcattctcagaaacttcttagggatgtttgcattcaagtaacagagatgaacattcccttacatagagcaggtttgaaacactctttttatagtatctggaagtggatatttggagcgcttcaagcctatgttgaaaaaggaaatatcttccaataaaaactagatagaagcaatgtcagaaacttttctatgatgtgtcttctcagttaacagagttgaacctacctttttagagagcagcttcaaaactctctttttgtggaatctgcaagtagatatttggctaggtttgtggatttcgttggaaacgggaatacatataaaaagcagacagcagcattctcagaaacttctttgtgatgtttgcattcaagtcacagagttgaacattccctttcataaagcaggtttgaaacactccttttgtcatatctggaagtgtccatttggagcgcattcaggcttgtgttgaaaaaggaaatatctttccataaaaaataaacagaagcattctcagaaactttatgtgtgccctctaacagagttgaacctttcttttcatggagcagttttgctacgctctttctgtagaatctgcaagaggatatttggatagctttgaggatttcgttggaaacggcattgtcttcagataatataaaatctagacaaatataaaatctagacaaaagcattctcagaaacttctttgggaggtttcaattcaagtcacagagttgaacattaccattcatagagcaggtttgaaacactcttttggtagtatctggaagtggacattgggagcgctttcaggactacggtgaaaaaggaaatatcttccaataagaactagacagaagcaatgtcagaaacttttttttgatgtatctactcatctaacagagttgaacatttcttctgagagagcagttttgaaacactctttttgtggaatctgcaagtggatattatgccagcttagaggatttcgttggaaacgggaatacatataaaaggcagacagcagcattctcagaaacttctttgtgatgtttgcattcaagtcacagagttgaacattccctttcacagagcaggtttgaaacactcttttgctagggtctggaagtggacatttggagcgctttcaggcctatggtgaaaaggaaatatcttccaataaaaactagacagaagcattctcagaaacttatttgtgatgtgtgtcctcaactaacagaggtgaacatttcttttgagagagcagttttgaaacactctttttgtagaatctgcaagtggatatttggatagctttgaggattttgttggaaacgggaatatcttcatataaaatccagacggaagcattctcagaaacttccttgtgatggttgcattcaagtcacagagttgaacattcgctttcatagagcaggtttgaaacacactgtagaaactgcaagtggacatttggagcgctttgaggcctatggtgaaaaaggaaatatcttcccataaaaactagacagaagcattctcagaaacttctttgggatgtttcaattgaagtcgcagtgttaaacattccctttcatagagcaggtttgaaacactattttgtagtatctggaagtggacatttggagcgctttcaggactacggagaaaaaggaaatatcttccaataaaaactagatagaagcaatgtcagaaacttttttatgatgtatctactcagctaacagagttgaacctttcttttgagagagcagaattgaaacactctttttgtggaatatgcaagtggatattagggcagcttggaggatttcgttgaaacgggaatacatattaaaagcagacagcagcattctcagaatcttctctgtgatgtttgcattcaagtcacagagttgaacattccctttcacagagcatgtttgaaacactctttatccattatctggaagtggacatttgtagcgttttcaggcctatggtgaaaaaggcaataccttcccataaaaactagacagaagcattctcagannnnnnnnnnnnnnnnnnnnnnnnnnnnnnnnnnnnnnnnnnnnnnnnnnnnnnnnnnnnnnnnnnnnnnnnnnnnnnnnnnnnnnnnnnnnnnnnnnnnnnnnnnnnnnnnnnnnnnnnnnnnnnnnnnnnnnnnnnnnnnnnnnnnnnnnnnnnnnnnnnnnnnnnnnnnnnnnnnnnnnnnnnnnnnnnnnnnnnnnnnnnnnnnnnnnnnnnnnnnnnnnnnnnnnnnnnnnnnnnnnnnnnnnnnnnnnnnnnnnnnnnnnnnnnnnnnnnnnnnnnnnnnnnnnnnnnnnnnnnnnnnnnnnnnnnnnnnnnnnnnnnnnnnnnnnnnnnnnnnnnnnnnnnnnnnnnnnnnnnnnnnnnnnnnnnnnnnnnnnnnnnnnnnnnnnnnnnnnnnnnnnnnnnnnnnnnnnnnnnnnnnnnnnnnnnnnnnnnnnnnnnnnnnnnnntgtcctcacctaacagagtagaacctttcttttgatagaacagttttgaaacactctttttgtagaatctgcaagtggatatttggatagctttgaggatttcgttggaaacgggaatatcttcgtataaaatctagacagaagcattctcagaaacttccttgtgatggttgcattcaagtcacaagagttgaacattcgctttcatagagcaggttggaaacaatctttttccattatcttgaagtggacatttggagtgctttgcggcctatggtaaaaaaggaaatatcttcccataaaaactagacagaagcattctcggaaactttttgtgatgtgtatcctcaactaacagagtggaatatttcttttgagacagcatttatgaaacactgtttttgtggaacctgcaatgggatatttggctggttttgaggatttcgttggaaacgcgaatacatataaaaagcagacagcaacgttctgagaaacttcttggtgatgtttgcattcaagtcacagagttgtacattccctttcatagaacaggtttgaaacactccttttgtcatatctggaagtgttcatgaggagcgcattcaggcttgtgttgaaaaagggaatatcttcccataaaaactagacagaagcattctcagcaacttgtttgtgatgtgtgccctctactaacagagttgaacctttcttttcatagagcagttttgaaacactccttttgtacaatctgcaggaggatttttgcatagctttgaggatttcgatggtaacggaattgtcttcagattaaatctagacagaagcattctcagaaacttatgtgggatgtttgcattcaagtcatggaggagaacattccctttcgtagaggaggtttgaaacattcctttgtagtatctggaagtggaaatttggagtggtctcaggcctatgttgaaaaaagaaatatcttcctgcaaaaactgcacagaagcattctcagaagctagtctctgatgtgtgtcctcaactaagagagttgaacatttctttacacagaacagttttgaaacactctttttgtggagtcttcaagtgaatatttggctagatttcaggatttcattggaaacgggattacgtacaaaaagacgacagcagcattctcagaaacttctttgtgatgtttgcattcaagtcacagaattgaacattccctttcacagagcaggtttgaaacactcttttcgtagtgcctgtaagtggacctttggagcagtttccggcctaaggtgaaaaaggacatatcttcccatacaacctagacagaagcattctcagaaacttactcgtgatgtgtgtcctcaattaacggagtcgaacctttcttttgatagagcagttttgaaacactccttttgtagaatctgcaagtggatatttggatagctttgaggatttcgttggaaacgggaatatcttcctataaaatctagacagaagcattctcagaaacttccttgtgatggttgctttcaagtcacggagttgaacattcgctttcatagagcaggttggaaacactctttttccattccctgaaagtggacgtttggagcgctttgaggcctaaggtggaaaaggaaatatcttcccataaaacctagacagaagcattctcagaaacttatttgtgatgtgtgtcctcaaatgacagagttgaacatttgttttgagagagcagttttgaaacactctttttatggaatctgcaagcggatatatggctggctttgacgatttagttggaaacgggaatacatataaaaaatagacagcagcgttctgagaaacttcttggtgatgtttgcattcaagtcacagaatggaacgttctctttcatagaacaggtttgaaaaactccttttgtcgtatgtggaagtgttcctttggagtgcattcaggcttgtgttgaaaaaggaaatatcttcccataaaaactagacagaggcattctcagcaacttgtttgtgatgtgtgtcctcaaccaacggagtagaatctttcttttgatagagcagttttgaaacactctttttgtagaatctgcaagtggatatttggatagctttgaggatttcgttggaaacgggaatatcttcatataaaatctagacagaagcattctcagaaacttccttgtgatggttgcattcaagtcacggagttgaacatttgctttcatagagcaggttgacaacactctttttgcattccctggaagtggacatttggagcgctttgaggcctatggtgaaaaaggaaatatcttcccataaaaactagacagaagcattctcagaaacttttttgtgatgtgtatcctcaactgacagagttgaacatttcttttgagggagcagaattgaaacactacttttgtggaatctgcaagtggatatttggctggctttgacgatttcgttggaaacggaaatacatataaaaagcagacagcagcgttctgagaaacttcttggtgatgtttgcattcaagtcacggaatggaacgttccctttcatagaacaggtttgaaacactccttttgtcgtatctggaagtgtccatttggagcgcattaaggcttgtgttgaaaaaggaaatatcttcctataaaatacagacaaaagcattctcagcaacttgtttgtgatgtgtgccctctacaaacagatttgaaattttcttttcatagagcagttttgaaacactctttttgtagaatctgcaggaggatatttgcataaatttgaggatttcgttggaaacgggattgtcttcagataaaatccagacaggagcattctcagaaacttctttgggatgtttgcattcaagtcacagaggagaacatgccctttcgtagagaaggtttgaaacactgtttttgtagtatctggaagtggacttttggagcggtttcaggcctatgttgaaaaaggaaatatcttcccgtaacaactggacagaagcatactcagaagctagtctctcatgtgtgtcctcaactaatagagttgaacatttctttagacagaagagttttgaaatactctttttggggagtctgaaagtggatatttggctagatttgaggatttcgttggaaacgggattacgaataaaaagccgacagcagcattctcagaaacttctttgtgatgtttgcataaaagtcacagaattgaacattccctttcacagagcaggtttgaaacactctttttgtagtgtctgtaagtggacttttggagtgctttccggccgaatgtgaaaaaggacatatcttcccataaaaattagacagaagcattctcagcaacttgtttgtgatgtgtgtcctcaaccaacagagtagaacctttcttttgatagagcagttttgaaacactctttttgtagaatctgcaagtggatatttggatagctttgaggatttcgttggaaacgggaatatcttcatataaaatctagatagaagcattctcagaaacttccttgtgatggttgcattcaagtcacggagttgaacattcactttcatagagcaggttnnnnnnnnnnnnnnnnnnnnnnnnnnnnnnnnnnnnnnnnnnnnnnnnnnnnnnnnnnnnnnnnnnnnnnnnnnnnnnnnnnnnnnnnnnnnnnnnnnnnnnnnnnnnnnnnnnnnnnnnnnnnnnnnnnnnnnnnnnnnnnnnnnnnnnnnnnnnnnnnnnnnnnnnnnnnnnnnnnnnnnnnnnnnnnnnnnnnnnnnnnnnnnnnnnnnnnnnnnnnnnnnnnnnnnnnnnnnnnnnnnnnnnnnnnnnnnnnnnnnnnnnnnnnnnnnnnnnnnnnnnnnnnnnnnnnnnnnnnnnnnnnnnnnnnnnnnnnnnnnnnnnnnnnnnnnnnnnnnnnnnnnnnnnnnnnnnnnnnnnnnnnnnnnnnnnnnnnnnnnnnnnnnnnnnnnnnnnnnnnnnnnnnnnnnnnnnnnnnnnnnnnnnnnnnnnnnnnnnnnnnnnnnnnnnnnnnnnnnnnnnnnnnnnnnnnnnnnnnnnnnnnnnnnnnnnnnnnnnnnnnnnnnnnnnnnnnnnnnnnnnnnnnnnnnnnnnnnnnnnnnnnnnnnnnnnnnnnnnnnnnnnnnnnnnnnnnnnnnnnnnnnnnnnnnnnnnnnnnnnnnnnnnnnnnnnnnnnnnnnnnnnnnnnnnnnnnnnnnnnnnnnnnnnnnnnnnnnnnnnnnnnnnnnnnnnnnnnnnnnnnnnnnnnnnnnnnnnnnnnnnnnnnnnnnnnnnnnnnnnnnnnnnnnnnnnnnnnnnnnnnnnnnnnnnnnnnnnnnnnnnnnnnnnnnnnnnnnnnnnnnnnnnnnnnnnnnnnnnnnnnnnnnnnnnnnnnnnnnnnnnnnnnnnnnnnnnnnnnnnnnnnnnnnnnnnnnnnnnnnnnnnnnnnnnnnnnnnnnnnnnnnnnnnnnnnnnnnnnnnnnnnnnnnnnnnnnnnnnnnnnnnnnnnnnnnnnnnnnnnnnnnnnnnnnnnnnnnnnnnnnnnnnnnnnnnnnnnnnnnnnnnnnnnnnnnnnnnnnnnnnnnnnnnnnnnnnnnnnnnnnnnnnnnnnnnnnnnnnnnnnnnnnnnnnnnnnnnnnnnnnnnnnnnnnnnnnnnnnnnnnnnnnnnnnnnnnnnnnnnnnnnnnnnnnnnnnnnnnnnnnnnnnnnnnnnnnnnnnnnnnnnnnnnnnnnnnnnnnnnnnnnnnnnnnnnnnnnnnnnnnnnnnnnnnnnnnnnnnnnnnnnnnnnnnnnnnnnnnnnnnnnnnnnnnnnnnnnnnnnnnnnnnnnnnnnnnnnnnnnnnnnnnnnnnnnnnnnnnnnnnnnnnnnnnnnnnnnnnnnnnnnnnnnnnnnnnnnnnnnnnnnnnnnnnnnnnnnnnnnnnnnnnnnnnnnnnnnnnnnnnnnnnnnnnnnnnnnnnnnnnnnnnnnnnnnnnnnnnnnnnnnnnnnnnnnnnnnnnnnnnnnnnnnnnnnnnnnnnnnnnnnnnnnnnnnnnnnnnnnnnnnnnnnnnnnnnnnnnnnnnnnnnnnnnnnnnnnnnnnnnnnnnnnnnnnnnnnnnnnnnnnnnnnnnnnnnnnnnnnnnnnnnnnnnnnnnnnnnnnnnnnnnnnnnnnnnnnnnnnnnnnnnnnnnnnnnnnnnnnnnnnnnnnnnnnnnnnnnnnnnnnnnnnnnnnnnnnnnnnnnnnnnnnnnnnnnnnnnnnnnnnnnnnnnnnnnnnnnnnnnnnnnnnnnnnnnnnnnnnnnnnnnnnnnnnnnnnnnnnnnnnnnnnnnnnnnnnnnnnnnnnnnnnnnnnnnnnnnnnnnnnnnnnnnnnnnnnnnnnnnnnnnnnnnnnnnnnnnnnnnnnnnnnnnnnnnnnnnnnnnnnnnnnnnnnnnnnnnnnnnnnnnnnnnnnnnnnnnnnnnnnnnnnnnnnnnnnnnnnnnnnnnnnnnnnnnnnnnnnnnnnnnnnnnnnnnnnnnnnnnnnnnnnnnnnnnnnnnnnnnnnnnnnnnnnnnnnnnnnnnnnnnnnnnnnnnnnnnnnnnnnnnnnnnnnnnnnnnnnnnnnnnnnnnnnnnnnnnnnnnnnnnnnnnnnnnnnnnnnnnnnnnnnnnnnnnnnnnnnnnnnnnnnnnnnnnnnnnnnnnnnnnnnnnnnnnnnnnnnnnnnnnnnnnnnnnnnnnnnnnnnnnnnnnnnnnnnnnnnnnnnnnnnnnnnnnnnnnnnnnnnnnnnnnnnnnnnnnnnnnnnnnnnnnnnnnnnnnnnnnnnnnnnnnnnnnnnnnnnnnnnnnnnnnnnnnnnnnnnnnnnnnnnnnnnnnnnnnnnnnnnnnnnnnnnnnnnnnnnnnnnnnnnnnnnnnnnnnnnnnnnnnnnnnnnnnnnnnnnnnnnnnnnnnnnnnnnnnnnnnnnnnnnnnnnnnnnnnnnnnnnnnnnnnnnnnnnnnnnnnnnnnnnnnnnnnnnnnnnnnnnnnnnnnnnnnnnnnnnnnnnnnnnnnnnnnnnnnnnnnnnnnnnnnnnnnnnnnnnnnnnnnnnnnnnnnnnnnnnnnnnnnnnnnnnnnnnnnnnnnnnnnnnnnnnnnnnnnnnnnnnnnnnnnnnnnnnnnnnnnnnnnnnnnnnnnnnnnnnnnnnnnnnnnnnnnnnnnnnnnnnnnnnnnnnnnnnnnnnnnnnnnnnnnnnnnnnnnnnnnnnnnnnnnnnnnnnnnnnnnnnnnnnnnnnnnnnnnnnnnnnnnnnnnnnnnnnnnnnnnnnnnnnnnnnnnnnnnnnnnnnnnnnnnnnnnnnnnnnnnnnnnnnnnnnnnnnnnnnnnnnnnnnnnnnnnnnnnnnnnnnnnnnnnnnnnnnnnnnnnnnnnnnnnnnnnnnnnnnnnnnnnnnnnnnnnnnnnnnnnnnnnnnnnnnnnnnnnnnnnnnnnnnnnnnnnnnnnnnnnnnnnnnnnnnnnnnnnnnnnnnnnnnnnnnnnnnnnnnnnnnnnnnnnnnnnnnnnnnnnnnnnnnnnnnnnnnnnnnnnnnnnnnnnnnnnnnnnnnnnnnnnnnnnnnnnnnnnnnnnnnnnnnnnnnnnnnnnnnnnnnnnnnnnnnnnnnnnnnnnnnnnnnnnnnnnnnnnnnnnnnnnnnnnnnnnnnnnnnnnnnnnnnnnnnnnnnnnnnnnnnnnnnnnnnnnnnnnnnnnnnnnnnnnnnnnnnnnnnnnnnnnnnnnnnnnnnnnnnnnnnnnnnnnnnnnnnnnnnnnnnnnnnnnnnnnnnnnnnnnnnnnnnnnnnnnnnnnnnnnnnnnnnnnnnnnnnnnnnnnnnnnnnnnnnnnnnnnnnnnnnnnnnnnnnnnnnnnnnnnnnnnnnnnnnnnnnnnnnnnnnnnnnnnnnnnnnnnnnnnnnnnnnnnnnnnnnnnnnnnnnnnnnnnnnnnnnnnnnnnnnnnnnnnnnnnnnnnnnnnnnnnnnnnnnnnnnnnnnnnnnnnnnnnnnnnnnnnnnnnnnnnnnnnnnnnnnnnnnnnnnnnnnnnnnnnnnnnnnnnnnnnnnnnnnnnnnnnnnnnnnnnnnnnnnnnnnnnnnnnnnnnnnnnnnnnnnnnnnnnnnnnnnnnnnnnnnnnnnnnnnnnnnnnnnnnnnnnnnnnnnnnnnnnnnnnnnnnnnnnnnnnnnnnnnnnnnnnnnnnnnnnnnnnnnnnnnnnnnnnnnnnnnnnnnnnnnnnnnnnnnnnnnnnnnnnnnnnnnnnnnnnnnnnnnnnnnnnnnnnnnnnnnnnnnnnnnnnnnnnnnnnnnnnnnnnnnnnnnnnnnnnnnnnnnnnnnnnnnnnnnnnnnnnnnnnnnnnnnnnnnnnnnnnnnnnnnnnnnnnnnnnnnnnnnnnnnnnnnnnnnnnnnnnnnnnnnnnnnnnnnnnnnnnnnnnnnnnnnnnnnnnnnnnnnnnnnnnnnnnnnnnnnnnnnnnnnnnnnnnnnnnnnnnnnnnnnnnnnnnnnnnnnnnnnnnnnnnnnnnnnnnnnnnnnnnnnnnnnnnnnnnnnnnnnnnnnnnnnnnnnnnnnnnnnnnnnnnnnnnnnnnnnnnnnnnnnnnnnnnnnnnnnnnnnnnnnnnnnnnnnnnnnnnnnnnnnnnnnnnnnnnnnnnnnnnnnnnnnnnnnnnnnnnnnnnnnnnnnnnnnnnnnnnnnnnnnnnnnnnnnnnnnnnnnnnnnnnnnnnnnnnnnnnnnnnnnnnnnnnnnnnnnnnnnnnnnnnnnnnnnnnnnnnnnnnnnnnnnnnnnnnnnnnnnnnnnnnnnnnnnnnnnnnnnnnnnnnnnnnnnnnnnnnnnnnnnnnnnnnnnnnnnnnnnnnnnnnnnnnnnnnnnnnnnnnnnnnnnnnnnnnnnnnnnnnnnnnnnnnnnnnnnnnnnnnnnnnnnnnnnnnnnnnnnnnnnnnnnnnnnnnnnnnnnnnnnnnnnnnnnnnnnnnnnnnnnnnnnnnnnnnnnnnnnnnnnnnnnnnnnnnnnnnnnnnnnnnnnnnnnnnnnnnnnnnnnnnnnnnnnnnnnnnnnnnnnnnnnnnnnnnnnnnnnnnnnnnnnnnnnnnnnnnnnnnnnnnnnnnnnnnnnnnnnnnnnnnnnnnnnnnnnnnnnnnnnnnnnnnnnnnnnnnnnnnnnnnnnnnnnnnnnnnnnnnnnnnnnnnnnnnnnnnnnnnnnnnnnnnnnnnnnnnnnnnnnnnnnnnnnnnnnnnnnnnnnnnnnnnnnnnnnnnnnnnnnnnnnnnnnnnnnnnnnnnnnnnnnnnnnnnnnnnnnnnnnnnnnnnnnnnnnnnnnnnnnnnnnnnnnnnnnnnnnnnnnnnnnnnnnnnnnnnnnnnnnnnnnnnnnnnnnnnnnnnnnnnnnnnnnnnnnnnnnnnnnnnnnnnnnnnnnnnnnnnnnnnnnnnnnnnnnnnnnnnnnnnnnnnnnnnnnnnnnnnnnnnnnnnnnnnnnnnnnnnnnnnnnnnnnnnnnnnnnnnnnnnnnnnnnnnnnnnnnnnnnnnnnnnnnnnnnnnnnnnnnnnnnnnnnnnnnnnnnnnnnnnnnnnnnnnnnnnnnnnnnnnnnnnnnnnnnnnnnnnnnnnnnnnnnnnnnnnnnnnnnnnnnnnnnnnnnnnnnnnnnnnnnnnnnnnnnnnnnnnnnnnnnnnnnnnnnnnnnnnnnnnnnnnnnnnnnnnnnnnnnnnnnnnnnnnnnnnnnnnnnnnnnnnnnnnnnnnnnnnnnnnnnnnnnnnnnnnnnnnnnnnnnnnnnnnnnnnnnnnnnnnnnnnnnnnnnnnnnnnnnnnnnnnnnnnnnnnnnnnnnnnnnnnnnnnnnnnnnnnnnnnnnnnnnnnnnnnnnnnnnnnnnnnnnnnnnnnnnnnnnnnnnnnnnnnnnnnnnnnnnnnnnnnnnnnnnnnnnnnnnnnnnnnnnnnnnnnnnnnnnnnnnnnnnnnnnnnnnnnnnnnnnnnnnnnnnnnnnnnnnnnnnnnnnnnnnnnnnnnnnnnnnnnnnnnnnnnnnnnnnnnnnnnnnnnnnnnnnnnnnnnnnnnnnnnnnnnnnnnnnnnnnnnnnnnnnnnnnnnnnnnnnnnnnnnnnnnnnnnnnnnnnnnnnnnnnnnnnnnnnnnnnnnnnnnnnnnnnnnnnnnnnnnnnnnnnnnnnnnnnnnnnnnnnnnnnnnnnnnnnnnnnnnnnnnnnnnnnnnnnnnnnnnnnnnnnnnnnnnnnnnnnnnnnnnnnnnnnnnnnnnnnnnnnnnnnnnnnnnnnnnnnnnnnnnnnnnnnnnnnnnnnnnnnnnnnnnnnnnnnnnnnnnnnnnnnnnnnnnnnnnnnnnnnnnnnnnnnnnnnnnnnnnnnnnnnnnnnnnnnnnnnnnnnnnnnnnnnnnnnnnnnnnnnnnnnnnnnnnnnnnnnnnnnnnnnnnnnnnnnnnnnnnnnnnnnnnnnnnnnnnnnnnnnnnnnnnnnnnnnnnnnnnnnnnnnnnnnnnnnnnnnnnnnnnnnnnnnnnnnnnnnnnnnnnnnnnnnnnnnnnnnnnnnnnnnnnnnnnnnnnnnnnnnnnnnnnnnnnnnnnnnnnnnnnnnnnnnnnnnnnnnnnnnnnnnnnnnnnnnnnnnnnnnnnnnnnnnnnnnnnnnnnnnnnnnnnnnnnnnnnnnnnnnnnnnnnnnnnnnnnnnnnnnnnnnnnnnnnnnnnnnnnnnnnnnnnnnnnnnnnnnnnnnnnnnnnnnnnnnnnnnnnnnnnnnnnnnnnnnnnnnnnnnnnnnnnnnnnnnnnnnnnnnnnnnnnnnnnnnnnnnnnnnnnnnnnnnnnnnnnnnnnnnnnnnnnnnnnnnnnnnnnnnnnnnnnnnnnnnnnnnnnnnnnnnnnnnnnnnnnnnnnnnnnnnnnnnnnnnnnnnnnnnnnnnnnnnnnnnnnnnnnnnnnnnnnnnnnnnnnnnnnnnnnnnnnnnnnnnnnnnnnnnnnnnnnnnnnnnnnnnnnnnnnnnnnnnnnnnnnnnnnnnnnnnnnnnnnnnnnnnnnnnnnnnnnnnnnnnnnnnnnnnnnnnnnnnnnnnnnnnnnnnnnnnnnnnnnnnnnnnnnnnnnnnnnnnnnnnnnnnnnnnnnnnnnnnnnnnnnnnnnnnnnnnnnnnnnnnnnnnnnnnnnnnnnnnnnnnnnnnnnnnnnnnnnnnnnnnnnnnnnnnnnnnnnnnnnnnnnnnnnnnnnnnnnnnnnnnnnnnnnnnnnnnnnnnnnnnnnnnnnnnnnnnnnnnnnnnnnnnnnnnnnnnnnnnnnnnnnnnnnnnnnnnnnnnnnnnnnnnnnnnnnnnnnnnnnnnnnnnnnnnnnnnnnnnnnnnnnnnnnnnnnnnnnnnnnnnnnnnnnnnnnnnnnnnnnnnnnnnnnnnnnnnnnnnnnnnnnnnnnnnnnnnnnnnnnnnnnnnnnnnnnnnnnnnnnnnnnnnnnnnnnnnnnnnnnnnnnnnnnnnnnnnnnnnnnnnnnnnnnnnnnnnnnnnnnnnnnnnnnnnnnnnnnnnnnnnnnnnnnnnnnnnnnnnnnnnnnnnnnnnnnnnnnnnnnnnnnnnnnnnnnnnnnnnnnnnnnnnnnnnnnnnnnnnnnnnnnnnnnnnnnnnnnnnnnnnnnnnnnnnnnnnnnnnnnnnnnnnnnnnnnnnnnnnnnnnnnnnnnnnnnnnnnnnnnnnnnnnnnnnnnnnnnnnnnnnnnnnnnnnnnnnnnnnnnnnnnnnnnnnnnnnnnnnnnnnnnnnnnnnnnnnnnnnnnnnnnnnnnnnnnnnnnnnnnnnnnnnnnnnnnnnnnnnnnnnnnnnnnnnnnnnnnnnnnnnnnnnnnnnnnnnnnnnnnnnnnnnnnnnnnnnnnnnnnnnnnnnnnnnnnnnnnnnnnnnnnnnnnnnnnnnnnnnnnnnnnnnnnnnnnnnnnnnnnnnnnnnnnnnnnnnnnnnnnnnnnnnnnnnnnnnnnnnnnnnnnnnnnnnnnnnnnnnnnnnnnnnnnnnnnnnnnnnnnnnnnnnnnnnnnnnnnnnnnnnnnnnnnnnnnnnnnnnnnnnnnnnnnnnnnnnnnnnnnnnnnnnnnnnnnnnnnnnnnnnnnnnnnnnnnnnnnnnnnnnnnnnnnnnnnnnnnnnnnnnnnnnnnnnnnnnnnnnnnnnnnnnnnnnnnnnnnnnnnnnnnnnnnnnnnnnnnnnnnnnnnnnnnnnnnnnnnnnnnnnnnnnnnnnnnnnnnnnnnnnnnnnnnnnnnnnnnnnnnnnnnnnnnnnnnnnnnnnnnnnnnnnnnnnnnnnnnnnnnnnnnnnnnnnnnnnnnnnnnnnnnnnnnnnnnnnnnnnnnnnnnnnnnnnnnnnnnnnnnnnnnnnnnnnnnnnnnnnnnnnnnnnnnnnnnnnnnnnnnnnnnnnnnnnnnnnnnnnnnnnnnnnnnnnnnnnnnnnnnnnnnnnnnnnnnnnnnnnnnnnnnnnnnnnnnnnnnnnnnnnnnnnnnnnnnnnnnnnnnnnnnnnnnnnnnnnnnnnnnnnnnnnnnnnnnnnnnnnnnnnnnnnnnnnnnnnnnnnnnnnnnnnnnnnnnnnnnnnnnnnnnnnnnnnnnnnnnnnnnnnnnnnnnnnnnnnnnnnnnnnnnnnnnnnnnnnnnnnnnnnnnnnnnnnnnnnnnnnnnnnnnnnnnnnnnnnnnnnnnnnnnnnnnnnnnnnnnnnnnnnnnnnnnnnnnnnnnnnnnnnnnnnnnnnnnnnnnnnnnnnnnnnnnnnnnnnnnnnnnnnnnnnnnnnnnnnnnnnnnnnnnnnnnnnnnnnnnnnnnnnnnnnnnnnnnnnnnnnnnnnnnnnnnnnnnnnnnnnnnnnnnnnnnnnnnnnnnnnnnnnnnnnnnnnnnnnnnnnnnnnnnnnnnnnnnnnnnnnnnnnnnnnnnnnnnnnnnnnnnnnnnnnnnnnnnnnnnnnnnnnnnnnnnnnnnnnnnnnnnnnnnnnnnnnnnnnnnnnnnnnnnnnnnnnnnnnnnnnnnnnnnnnnnnnnnnnnnnnnnnnnnnnnnnnnnnnnnnnnnnnnnnnnnnnnnnnnnnnnnnnnnnnnnnnnnnnnnnnnnnnnnnnnnnnnnnnnnnnnnnnnnnnnnnnnnnnnnnnnnnnnnnnnnnnnnnnnnnnnnnnnnnnnnnnnnnnnnnnnnnnnnnnnnnnnnnnnnnnnnnnnnnnnnnnnnnnnnnnnnnnnnnnnnnnnnnnnnnnnnnnnnnnnnnnnnnnnnnnnnnnnnnnnnnnnnnnnnnnnnnnnnnnnnnnnnnnnnnnnnnnnnnnnnnnnnnnnnnnnnnnnnnnnnnnnnnnnnnnnnnnnnnnnnnnnnnnnnnnnnnnnnnnnnnnnnnnnnnnnnnnnnnnnnnnnnnnnnnnnnnnnnnnnnnnnnnnnnnnnnnnnnnnnnnnnnnnnnnnnnnnnnnnnnnnnnnnnnnnnnnnnnnnnnnnnnnnnnnnnnnnnnnnnnnnnnnnnnnnnnnnnnnnnnnnnnnnnnnnnnnnnnnnnnnnnnnnnnnnnnnnnnnnnnnnnnnnnnnnnnnnnnnnnnnnnnnnnnnnnnnnnnnnnnnnnnnnnnnnnnnnnnnnnnnnnnnnnnnnnnnnnnnnnnnnnnnnnnnnnnnnnnnnnnnnnnnnnnnnnnnnnnnnnnnnnnnnnnnnnnnnnnnnnnnnnnnnnnnnnnnnnnnnnnnnnnnnnnnnnnnnnnnnnnnnnnnnnnnnnnnnnnnnnnnnnnnnnnnnnnnnnnnnnnnnnnnnnnnnnnnnnnnnnnnnnnnnnnnnnnnnnnnnnnnnnnnnnnnnnnnnnnnnnnnnnnnnnnnnnnnnnnnnnnnnnnnnnnnnnnnnnnnnnnnnnnnnnnnnnnnnnnnnnnnnnnnnnnnnnnnnnnnnnnnnnnnnnnnnnnnnnnnnnnnnnnnnnnnnnnnnnnnnnnnnnnnnnnnnnnnnnnnnnnnnnnnnnnnnnnnnnnnnnnnnnnnnnnnnnnnnnnnnnnnnnnnnnnnnnnnnnnnnnnnnnnnnnnnnnnnnnnnnnnnnnnnnnnnnnnnnnnnnnnnnnnnnnnnnnnnnnnnnnnnnnnnnnnnnnnnnnnnnnnnnnnnnnnnnnnnnnnnnnnnnnnnnnnnnnnnnnnnnnnnnnnnnnnnnnnnnnnnnnnnnnnnnnnnnnnnnnnnnnnnnnnnnnnnnnnnnnnnnnnnnnnnnnnnnnnnnnnnnnnnnnnnnnnnnnnnnnnnnnnnnnnnnnnnnnnnnnnnnnnnnnnnnnnnnnnnnnnnnnnnnnnnnnnnnnnnnnnnnnnnnnnnnnnnnnnnnnnnnnnnnnnnnnnnnnnnnnnnnnnnnnnnnnnnnnnnnnnnnnnnnnnnnnnnnnnnnnnnnnnnnnnnnnnnnnnnnnnnnnnnnnnnnnnnnnnnnnnnnnnnnnnnnnnnnnnnnnnnnnnnnnnnnnnnnnnnnnnnnnnnnnnnnnnnnnnnnnnnnnnnnnnnnnnnnnnnnnnnnnnnnnnnnnnnnnnnnnnnnnnnnnnnnnnnnnnnnnnnnnnnnnnnnnnnnnnnnnnnnnnnnnnnnnnnnnnnnnnnnnnnnnnnnnnnnnnnnnnnnnnnnnnnnnnnnnnnnnnnnnnnnnnnnnnnnnnnnnnnnnnnnnnnnnnnnnnnnnnnnnnnnnnnnnnnnnnnnnnnnnnnnnnnnnnnnnnnnnnnnnnnnnnnnnnnnnnnnnnnnnnnnnnnnnnnnnnnnnnnnnnnnnnnnnnnnnnnnnnnnnnnnnnnnnnnnnnnnnnnnnnnnnnnnnnnnnnnnnnnnnnnnnnnnnnnnnnnnnnnnnnnnnnnnnnnnnnnnnnnnnnnnnnnnnnnnnnnnnnnnnnnnnnnnnnnnnnnnnnnnnnnnnnnnnnnnnnnnnnnnnnnnnnnnnnnnnnnnnnnnnnnnnnnnnnnnnnnnnnnnnnnnnnnnnnnnnnnnnnnnnnnnnnnnnnnnnnnnnnnnnnnnnnnnnnnnnnnnnnnnnnnnnnnnnnnnnnnnnnnnnnnnnnnnnnnnnnnnnnnnnnnnnnnnnnnnnnnnnnnnnnnnnnnnnnnnnnnnnnnnnnnnnnnnnnnnnnnnnnnnnnnnnnnnnnnnnnnnnnnnnnnnnnnnnnnnnnnnnnnnnnnnnnnnnnnnnnnnnnnnnnnnnnnnnnnnnnnnnnnnnnnnnnnnnnnnnnnnnnnnnnnnnnnnnnnnnnnnnnnnnnnnnnnnnnnnnnnnnnnnnnnnnnnnnnnnnnnnnnnnnnnnnnnnnnnnnnnnnnnnnnnnnnnnnnnnnnnnnnnnnnnnnnnnnnnnnnnnnnnnnnnnnnnnnnnnnnnnnnnnnnnnnnnnnnnnnnnnnnnnnnnnnnnnnnnnnnnnnnnnnnnnnnnnnnnnnnnnnnnnnnnnnnnnnnnnnnnnnnnnnnnnnnnnnnnnnnnnnnnnnnnnnnnnnnnnnnnnnnnnnnnnnnnnnnnnnnnnnnnnnnnnnnnnnnnnnnnnnnnnnnnnnnnnnnnnnnnnnnnnnnnnnnnnnnnnnnnnnnnnnnnnnnnnnnnnnnnnnnnnnnnnnnnnnnnnnnnnnnnnnnnnnnnnnnnnnnnnnnnnnnnnnnnnnnnnnnnnnnnnnnnnnnnnnnnnnnnnnnnnnnnnnnnnnnnnnnnnnnnnnnnnnnnnnnnnnnnnnnnnnnnnnnnnnnnnnnnnnnnnnnnnnnnnnnnnnnnnnnnnnnnnnnnnnnnnnnnnnnnnnnnnnnnnnnnnnnnnnnnnnnnnnnnnnnnnnnnnnnnnnnnnnnnnnnnnnnnnnnnnnnnnnnnnnnnnnnnnnnnnnnnnnnnnnnnnnnnnnnnnnnnnnnnnnnnnnnnnnnnnnnnnnnnnnnnnnnnnnnnnnnnnnnnnnnnnnnnnnnnnnnnnnnnnnnnnnnnnnnnnnnnnnnnnnnnnnnnnnnnnnnnnnnnnnnnnnnnnnnnnnnnnnnnnnnnnnnnnnnnnnnnnnnnnnnnnnnnnnnnnnnnnnnnnnnnnnnnnnnnnnnnnnnnnnnnnnnnnnnnnnnnnnnnnnnnnnnnnnnnnnnnnnnnnnnnnnnnnnnnnnnnnnnnnnnnnnnnnnnnnnnnnnnnnnnnnnnnnnnnnnnnnnnnnnnnnnnnnnnnnnnnnnnnnnnnnnnnnnnnnnnnnnnnnnnnnnnnnnnnnnnnnnnnnnnnnnnnnnnnnnnnnnnnnnnnnnnnnnnnnnnnnnnnnnnnnnnnnnnnnnnnnnnnnnnnnnnnnnnnnnnnnnnnnnnnnnnnnnnnnnnnnnnnnnnnnnnnnnnnnnnnnnnnnnnnnnnnnnnnnnnnnnnnnnnnnnnnnnnnnnnnnnnnnnnnnnnnnnnnnnnnnnnnnnnnnnnnnnnnnnnnnnnnnnnnnnnnnnnnnnnnnnnnnnnnnnnnnnnnnnnnnnnnnnnnnnnnnnnnnnnnnnnnnnnnnnnnnnnnnnnnnnnnnnnnnnnnnnnnnnnnnnnnnnnnnnnnnnnnnnnnnnnnnnnnnnnnnnnnnnnnnnnnnnnnnnnnnnnnnnnnnnnnnnnnnnnnnnnnnnnnnnnnnnnnnnnnnnnnnnnnnnnnnnnnnnnnnnnnnnnnnnnnnnnnnnnnnnnnnnnnnnnnnnnnnnnnnnnnnnnnnnnnnnnnnnnnnnnnnnnnnnnnnnnnnnnnnnnnnnnnnnnnnnnnnnnnnnnnnnnnnnnnnnnnnnnnnnnnnnnnnnnnnnnnnnnnnnnnnnnnnnnnnnnnnnnnnnnnnnnnnnnnnnnnnnnnnnnnnnnnnnnnnnnnnnnnnnnnnnnnnnnnnnnnnnnnnnnnnnnnnnnnnnnnnnnnnnnnnnnnnnnnnnnnnnnnnnnnnnnnnnnnnnnnnnnnnnnnnnnnnnnnnnnnnnnnnnnnnnnnnnnnnnnnnnnnnnnnnnnnnnnnnnnnnnnnnnnnnnnnnnnnnnnnnnnnnnnnnnnnnnnnnnnnnnnnnnnnnnnnnnnnnnnnnnnnnnnnnnnnnnnnnnnnnnnnnnnnnnnnnnnnnnnnnnnnnnnnnnnnnnnnnnnnnnnnnnnnnnnnnnnnnnnnnnnnnnnnnnnnnnnnnnnnnnnnnnnnnnnnnnnnnnnnnnnnnnnnnnnnnnnnnnnnnnnnnnnnnnnnnnnnnnnnnnnnnnnnnnnnnnnnnnnnnnnnnnnnnnnnnnnnnnnnnnnnnnnnnnnnnnnnnnnnnnnnnnnnnnnnnnnnnnnnnnnnnnnnnnnnnnnnnnnnnnnnnnnnnnnnnnnnnnnnnnnnnnnnnnnnnnnnnnnnnnnnnnnnnnnnnnnnnnnnnnnnnnnnnnnnnnnnnnnnnnnnnnnnnnnnnnnnnnnnnnnnnnnnnnnnnnnnnnnnnnnnnnnnnnnnnnnnnnnnnnnnnnnnnnnnnnnnnnnnnnnnnnnnnnnnnnnnnnnnnnnnnnnnnnnnnnnnnnnnnnnnnnnnnnnnnnnnnnnnnnnnnnnnnnnnnnnnnnnnnnnnnnnnnnnnnnnnnnnnnnnnnnnnnnnnnnnnnnnnnnnnnnnnnnnnnnnnnnnnnnnnnnnnnnnnnnnnnnnnnnnnnnnnnnnnnnnnnnnnnnnnnnnnnnnnnnnnnnnnnnnnnnnnnnnnnnnnnnnnnnnnnnnnnnnnnnnnnnnnnnnnnnnnnnnnnnnnnnnnnnnnnnnnnnnnnnnnnnnnnnnnnnnnnnnnnnnnnnnnnnnnnnnnnnnnnnnnnnnnnnnnnnnnnnnnnnnnnnnnnnnnnnnnnnnnnnnnnnnnnnnnnnnnnnnnnnnnnnnnnnnnnnnnnnnnnnnnnnnnnnnnnnnnnnnnnnnnnnnnnnnnnnnnnnnnnnnnnnnnnnnnnnnnnnnnnnnnnnnnnnnnnnnnnnnnnnnnnnnnnnnnnnnnnnnnnnnnnnnnnnnnnnnnnnnnnnnnnnnnnnnnnnnnnnnnnnnnnnnnnnnnnnnnnnnnnnnnnnnnnnnnnnnnnnnnnnnnnnnnnnnnnnnnnnnnnnnnnnnnnnnnnnnnnnnnnnnnnnnnnnnnnnnnnnnnnnnnnnnnnnnnnnnnnnnnnnnnnnnnnnnnnnnnnnnnnnnnnnnnnnnnnnnnnnnnnnnnnnnnnnnnnnnnnnnnnnnnnnnnnnnnnnnnnnnnnnnnnnnnnnnnnnnnnnnnnnnnnnnnnnnnnnnnnnnnnnnnnnnnnnnnnnnnnnnnnnnnnnnnnnnnnnnnnnnnnnnnnnnnnnnnnnnnnnnnnnnnnnnnnnnnnnnnnnnnnnnnnnnnnnnnnnnnnnnnnnnnnnnnnnnnnnnnnnnnnnnnnnnnnnnnnnnnnnnnnnnnnnnnnnnnnnnnnnnnnnnnnnnnnnnnnnnnnnnnnnnnnnnnnnnnnnnnnnnnnnnnnnnnnnnnnnnnnnnnnnnnnnnnnnnnnnnnnnnnnnnnnnnnnnnnnnnnnnnnnnnnnnnnnnnnnnnnnnnnnnnnnnnnnnnnnnnnnnnnnnnnnnnnnnnnnnnnnnnnnnnnnnnnnnnnnnnnnnnnnnnnnnnnnnnnnnnnnnnnnnnnnnnnnnnnnnnnnnnnnnnnnnnnnnnnnnnnnnnnnnnnnnnnnnnnnnnnnnnnnnnnnnnnnnnnnnnnnnnnnnnnnnnnnnnnnnnnnnnnnnnnnnnnnnnnnnnnnnnnnnnnnnnnnnnnnnnnnnnnnnnnnnnnnnnnnnnnnnnnnnnnnnnnnnnnnnnnnnnnnnnnnnnnnnnnnnnnnnnnnnnnnnnnnnnnnnnnnnnnnnnnnnnnnnnnnnnnnnnnnnnnnnnnnnnnnnnnnnnnnnnnnnnnnnnnnnnnnnnnnnnnnnnnnnnnnnnnnnnnnnnnnnnnnnnnnnnnnnnnnnnnnnnnnnnnnnnnnnnnnnnnnnnnnnnnnnnnnnnnnnnnnnnnnnnnnnnnnnnnnnnnnnnnnnnnnnnnnnnnnnnnnnnnnnnnnnnnnnnnnnnnnnnnnnnnnnnnnnnnnnnnnnnnnnnnnnnnnnnnnnnnnnnnnnnnnnnnnnnnnnnnnnnnnnnnnnnnnnnnnnnnnnnnnnnnnnnnnnnnnnnnnnnnnnnnnnnnnnnnnnnnnnnnnnnnnnnnnnnnnnnnnnnnnnnnnnnnnnnnnnnnnnnnnnnnnnnnnnnnnnnnnnnnnnnnnnnnnnnnnnnnnnnnnnnnnnnnnnnnnnnnnnnnnnnnnnnnnnnnnnnnnnnnnnnnnnnnnnnnnnnnnnnnnnnnnnnnnnnnnnnnnnnnnnnnnnnnnnnnnnnnnnnnnnnnnnnnnnnnnnnnnnnnnnnnnnnnnnnnnnnnnnnnnnnnnnnnnnnnnnnnnnnnnnnnnnnnnnnnnnnnnnnnnnnnnnnnnnnnnnnnnnnnnnnnnnnnnnnnnnnnnnnnnnnnnnnnnnnnnnnnnnnnnnnnnnnnnnnnnnnnnnnnnnnnnnnnnnnnnnnnnnnnnnnnnnnnnnnnnnnnnnnnnnnnnnnnnnnnnnnnnnnnnnnnnnnnnnnnnnnnnnnnnnnnnnnnnnnnnnnnnnnnnnnnnnnnnnnnnnnnnnnnnnnnnnnnnnnnnnnnnnnnnnnnnnnnnnnnnnnnnnnnnnnnnnnnnnnnnnnnnnnnnnnnnnnnnnnnnnnnnnnnnnnnnnnnnnnnnnnnnnnnnnnnnnnnnnnnnnnnnnnnnnnnnnnnnnnnnnnnnnnnnnnnnnnnnnnnnnnnnnnnnnnnnnnnnnnnnnnnnnnnnnnnnnnnnnnnnnnnnnnnnnnnnnnnnnnnnnnnnnnnnnnnnnnnnnnnnnnnnnnnnnnnnnnnnnnnnnnnnnnnnnnnnnnnnnnnnnnnnnnnnnnnnnnnnnnnnnnnnnnnnnnnnnnnnnnnnnnnnnnnnnnnnnnnnnnnnnnnnnnnnnnnnnnnnnnnnnnnnnnnnnnnnnnnnnnnnnnnnnnnnnnnnnnnnnnnnnnnnnnnnnnnnnnnnnnnnnnnnnnnnnnnnnnnnnnnnnnnnnnnnnnnnnnnnnnnnnnnnnnnnnnnnnnnnnnnnnnnnnnnnnnnnnnnnnnnnnnnnnnnnnnnnnnnnnnnnnnnnnnnnnnnnnnnnnnnnnnnnnnnnnnnnnnnnnnnnnnnnnnnnnnnnnnnnnnnnnnnnnnnnnnnnnnnnnnnnnnnnnnnnnnnnnnnnnnnnnnnnnnnnnnnnnnnnnnnnnnnnnnnnnnnnnnnnnnnnnnnnnnnnnnnnnnnnnnnnnnnnnnnnnnnnnnnnnnnnnnnnnnnnnnnnnnnnnnnnnnnnnnnnnnnnnnnnnnnnnnnnnnnnnnnnnnnnnnnnnnnnnnnnnnnnnnnnnnnnnnnnnnnnnnnnnnnnnnnnnnnnnnnnnnnnnnnnnnnnnnnnnnnnnnnnnnnnnnnnnnnnnnnnnnnnnnnnnnnnnnnnnnnnnnnnnnnnnnnnnnnnnnnnnnnnnnnnnnnnnnnnnnnnnnnnnnnnnnnnnnnnnnnnnnnnnnnnnnnnnnnnnnnnnnnnnnnnnnnnnnnnnnnnnnnnnnnnnnnnnnnnnnnnnnnnnnnnnnnnnnnnnnnnnnnnnnnnnnnnnnnnnnnnnnnnnnnnnnnnnnnnnnnnnnnnnnnnnnnnnnnnnnnnnnnnnnnnnnnnnnnnnnnnnnnnnnnnnnnnnnnnnnnnnnnnnnnnnnnnnnnnnnnnnnnnnnnnnnnnnnnnnnnnnnnnnnnnnnnnnnnnnnnnnnnnnnnnnnnnnnnnnnnnnnnnnnnnnnnnnnnnnnnnnnnnnnnnnnnnnnnnnnnnnnnnnnnnnnnnnnnnnnnnnnnnnnnnnnnnnnnnnnnnnnnnnnnnnnnnnnnnnnnnnnnnnnnnnnnnnnnnnnnnnnnnnnnnnnnnnnnnnnnnnnnnnnnnnnnnnnnnnnnnnnnnnnnnnnnnnnnnnnnnnnnnnnnnnnnnnnnnnnnnnnnnnnnnnnnnnnnnnnnnnnnnnnnnnnnnnnnnnnnnnnnnnnnnnnnnnnnnnnnnnnnnnnnnnnnnnnnnnnnnnnnnnnnnnnnnnnnnnnnnnnnnnnnnnnnnnnnnnnnnnnnnnnnnnnnnnnnnnnnnnnnnnnnnnnnnnnnnnnnnnnnnnnnnnnnnnnnnnnnnnnnnnnnnnnnnnnnnnnnnnnnnnnnnnnnnnnnnnnnnnnnnnnnnnnnnnnnnnnnnnnnnnnnnnnnnnnnnnnnnnnnnnnnnnnnnnnnnnnnnnnnnnnnnnnnnnnnnnnnnnnnnnnnnnnnnnnnnnnnnnnnnnnnnnnnnnnnnnnnnnnnnnnnnnnnnnnnnnnnnnnnnnnnnnnnnnnnnnnnnnnnnnnnnnnnnnnnnnnnnnnnnnnnnnnnnnnnnnnnnnnnnnnnnnnnnnnnnnnnnnnnnnnnnnnnnnnnnnnnnnnnnnnnnnnnnnnnnnnnnnnnnnnnnnnnnnnnnnnnnnnnnnnnnnnnnnnnnnnnnnnnnnnnnnnnnnnnnnnnnnnnnnnnnnnnnnnnnnnnnnnnnnnnnnnnnnnnnnnnnnnnnnnnnnnnnnnnnnnnnnnnnnnnnnnnnnnnnnnnnnnnnnnnnnnnnnnnnnnnnnnnnnnnnnnnnnnnnnnnnnnnnnnnnnnnnnnnnnnnnnnnnnnnnnnnnnnnnnnnnnnnnnnnnnnnnnnnnnnnnnnnnnnnnnnnnnnnnnnnnnnnnnnnnnnnnnnnnnnnnnnnnnnnnnnnnnnnnnnnnnnnnnnnnnnnnnnnnnnnnnnnnnnnnnnnnnnnnnnnnnnnnnnnnnnnnnnnnnnnnnnnnnnnnnnnnnnnnnnnnnnnnnnnnnnnnnnnnnnnnnnnnnnnnnnnnnnnnnnnnnnnnnnnnnnnnnnnnnnnnnnnnnnnnnnnnnnnnnnnnnnnnnnnnnnnnnnnnnnnnnnnnnnnnnnnnnnnnnnnnnnnnnnnnnnnnnnnnnnnnnnnnnnnnnnnnnnnnnnnnnnnnnnnnnnnnnnnnnnnnnnnnnnnnnnnnnnnnnnnnnnnnnnnnnnnnnnnnnnnnnnnnnnnnnnnnnnnnnnnnnnnnnnnnnnnnnnnnnnnnnnnnnnnnnnnnnnnnnnnnnnnnnnnnnnnnnnnnnnnnnnnnnnnnnnnnnnnnnnnnnnnnnnnnnnnnnnnnnnnnnnnnnnnnnnnnnnnnnnnnnnnnnnnnnnnnnnnnnnnnnnnnnnnnnnnnnnnnnnnnnnnnnnnnnnnnnnnnnnnnnnnnnnnnnnnnnnnnnnnnnnnnnnnnnnnnnnnnnnnnnnnnnnnnnnnnnnnnnnnnnnnnnnnnnnnnnnnnnnnnnnnnnnnnnnnnnnnnnnnnnnnnnnnnnnnnnnnnnnnnnnnnnnnnnnnnnnnnnnnnnnnnnnnnnnnnnnnnnnnnnnnnnnnnnnnnnnnnnnnnnnnnnnnnnnnnnnnnnnnnnnnnnnnnnnnnnnnnnnnnnnnnnnnnnnnnnnnnnnnnnnnnnnnnnnnnnnnnnnnnnnnnnnnnnnnnnnnnnnnnnnnnnnnnnnnnnnnnnnnnnnnnnnnnnnnnnnnnnnnnnnnnnnnnnnnnnnnnnnnnnnnnnnnnnnnnnnnnnnnnnnnnnnnnnnnnnnnnnnnnnnnnnnnnnnnnnnnnnnnnnnnnnnnnnnnnnnnnnnnnnnnnnnnnnnnnnnnnnnnnnnnnnnnnnnnnnnnnnnnnnnnnnnnnnnnnnnnnnnnnnnnnnnnnnnnnnnnnnnnnnnnnnnnnnnnnnnnnnnnnnnnnnnnnnnnnnnnnnnnnnnnnnnnnnnnnnnnnnnnnnnnnnnnnnnnnnnnnnnnnnnnnnnnnnnnnnnnnnnnnnnnnnnnnnnnnnnnnnnnnnnnnnnnnnnnnnnnnnnnnnnnnnnnnnnnnnnnnnnnnnnnnnnnnnnnnnnnnnnnnnnnnnnnnnnnnnnnnnnnnnnnnnnnnnnnnnnnnnnnnnnnnnnnnnnnnnnnnnnnnnnnnnnnnnnnnnnnnnnnnnnnnnnnnnnnnnnnnnnnnnnnnnnnnnnnnnnnnnnnnnnnnnnnnnnnnnnnnnnnnnnnnnnnnnnnnnnnnnnnnnnnnnnnnnnnnnnnnnnnnnnnnnnnnnnnnnnnnnnnnnnnnnnnnnnnnnnnnnnnnnnnnnnnnnnnnnnnnnnnnnnnnnnnnnnnnnnnnnnnnnnnnnnnnnnnnnnnnnnnnnnnnnnnnnnnnnnnnnnnnnnnnnnnnnnnnnnnnnnnnnnnnnnnnnnnnnnnnnnnnnnnnnnnnnnnnnnnnnnnnnnnnnnnnnnnnnnnnnnnnnnnnnnnnnnnnnnnnnnnnnnnnnnnnnnnnnnnnnnnnnnnnnnnnnnnnnnnnnnnnnnnnnnnnnnnnnnnnnnnnnnnnnnnnnnnnnnnnnnnnnnnnnnnnnnnnnnnnnnnnnnnnnnnnnnnnnnnnnnnnnnnnnnnnnnnnnnnnnnnnnnnnnnnnnnnnnnnnnnnnnnnnnnnnnnnnnnnnnnnnnnnnnnnnnnnnnnnnnnnnnnnnnnnnnnnnnnnnnnnnnnnnnnnnnnnnnnnnnnnnnnnnnnnnnnnnnnnnnnnnnnnnnnnnnnnnnnnnnnnnnnnnnnnnnnnnnnnnnnnnnnnnnnnnnnnnnnnnnnnnnnnnnnnnnnnnnnnnnnnnnnnnnnnnnnnnnnnnnnnnnnnnnnnnnnnnnnnnnnnnnnnnnnnnnnnnnnnnnnnnnnnnnnnnnnnnnnnnnnnnnnnnnnnnnnnnnnnnnnnnnnnnnnnnnnnnnnnnnnnnnnnnnnnnnnnnnnnnnnnnnnnnnnnnnnnnnnnnnnnnnnnnnnnnnnnnnnnnnnnnnnnnnnnnnnnnnnnnnnnnnnnnnnnnnnnnnnnnnnnnnnnnnnnnnnnnnnnnnnnnnnnnnnnnnnnnnnnnnnnnnnnnnnnnnnnnnnnnnnnnnnnnnnnnnnnnnnnnnnnnnnnnnnnnnnnnnnnnnnnnnnnnnnnnnnnnnnnnnnnnnnnnnnnnnnnnnnnnnnnnnnnnnnnnnnnnnnnnnnnnnnnnnnnnnnnnnnnnnnnnnnnnnnnnnnnnnnnnnnnnnnnnnnnnnnnnnnnnnnnnnnnnnnnnnnnnnnnnnnnnnnnnnnnnnnnnnnnnnnnnnnnnnnnnnnnnnnnnnnnnnnnnnnnnnnnnnnnnnnnnnnnnnnnnnnnnnnnnnnnnnnnnnnnnnnnnnnnnnnnnnnnnnnnnnnnnnnnnnnnnnnnnnnnnnnnnnnnnnnnnnnnnnnnnnnnnnnnnnnnnnnnnnnnnnnnnnnnnnnnnnnnnnnnnnnnnnnnnnnnnnnnnnnnnnnnnnnnnnnnnnnnnnnnnnnnnnnnnnnnnnnnnnnnnnnnnnnnnnnnnnnnnnnnnnnnnnnnnnnnnnnnnnnnnnnnnnnnnnnnnnnnnnnnnnnnnnnnnnnnnnnnnnnnnnnnnnnnnnnnnnnnnnnnnnnnnnnnnnnnnnnnnnnnnnnnnnnnnnnnnnnnnnnnnnnnnnnnnnnnnnnnnnnnnnnnnnnnnnnnnnnnnnnnnnnnnnnnnnnnnnnnnnnnnnnnnnnnnnnnnnnnnnnnnnnnnnnnnnnnnnnnnnnnnnnnnnnnnnnnnnnnnnnnnnnnnnnnnnnnnnnnnnnnnnnnnnnnnnnnnnnnnnnnnnnnnnnnnnnnnnnnnnnnnnnnnnnnnnnnnnnnnnnnnnnnnnnnnnnnnnnnnnnnnnnnnnnnnnnnnnnnnnnnnnnnnnnnnnnnnnnnnnnnnnnnnnnnnnnnnnnnnnnnnnnnnnnnnnnnnnnnnnnnnnnnnnnnnnnnnnnnnnnnnnnnnnnnnnnnnnnnnnnnnnnnnnnnnnnnnnnnnnnnnnnnnnnnnnnnnnnnnnnnnnnnnnnnnnnnnnnnnnnnnnnnnnnnnnnnnnnnnnnnnnnnnnnnnnnnnnnnnnnnnnnnnnnnnnnnnnnnnnnnnnnnnnnnnnnnnnnnnnnnnnnnnnnnnnnnnnnnnnnnnnnnnnnnnnnnnnnnnnnnnnnnnnnnnnnnnnnnnnnnnnnnnnnnnnnnnnnnnnnnnnnnnnnnnnnnnnnnnnnnnnnnnnnnnnnnnnnnnnnnnnnnnnnnnnnnnnnnnnnnnnnnnnnnnnnnnnnnnnnnnnnnnnnnnnnnnnnnnnnnnnnnnnnnnnnnnnnnnnnnnnnnnnnnnnnnnnnnnnnnnnnnnnnnnnnnnnnnnnnnnnnnnnnnnnnnnnnnnnnnnnnnnnnnnnnnnnnnnnnnnnnnnnnnnnnnnnnnnnnnnnnnnnnnnnnnnnnnnnnnnnnnnnnnnnnnnnnnnnnnnnnnnnnnnnnnnnnnnnnnnnnnnnnnnnnnnnnnnnnnnnnnnnnnnnnnnnnnnnnnnnnnnnnnnnnnnnnnnnnnnnnnnnnnnnnnnnnnnnnnnnnnnnnnnnnnnnnnnnnnnnnnnnnnnnnnnnnnnnnnnnnnnnnnnnnnnnnnnnnnnnnnnnnnnnnnnnnnnnnnnnnnnnnnnnnnnnnnnnnnnnnnnnnnnnnnnnnnnnnnnnnnnnnnnnnnnnnnnnnnnnnnnnnnnnnnnnnnnnnnnnnnnnnnnnnnnnnnnnnnnnnnnnnnnnnnnnnnnnnnnnnnnnnnnnnnnnnnnnnnnnnnnnnnnnnnnnnnnnnnnnnnnnnnnnnnnnnnnnnnnnnnnnnnnnnnnnnnnnnnnnnnnnnnnnnnnnnnnnnnnnnnnnnnnnnnnnnnnnnnnnnnnnnnnnnnnnnnnnnnnnnnnnnnnnnnnnnnnnnnnnnnnnnnnnnnnnnnnnnnnnnnnnnnnnnnnnnnnnnnnnnnnnnnnnnnnnnnnnnnnnnnnnnnnnnnnnnnnnnnnnnnnnnnnnnnnnnnnnnnnnnnnnnnnnnnnnnnnnnnnnnnnnnnnnnnnnnnnnnnnnnnnnnnnnnnnnnnnnnnnnnnnnnnnnnnnnnnnnnnnnnnnnnnnnnnnnnnnnnnnnnnnnnnnnnnnnnnnnnnnnnnnnnnnnnnnnnnnnnnnnnnnnnnnnnnnnnnnnnnnnnnnnnnnnnnnnnnnnnnnnnnnnnnnnnnnnnnnnnnnnnnnnnnnnnnnnnnnnnnnnnnnnnnnnnnnnnnnnnnnnnnnnnnnnnnnnnnnnnnnnnnnnnnnnnnnnnnnnnnnnnnnnnnnnnnnnnnnnnnnnnnnnnnnnnnnnnnnnnnnnnnnnnnnnnnnnnnnnnnnnnnnnnnnnnnnnnnnnnnnnnnnnnnnnnnnnnnnnnnnnnnnnnnnnnnnnnnnnnnnnnnnnnnnnnnnnnnnnnnnnnnnnnnnnnnnnnnnnnnnnnnnnnnnnnnnnnnnnnnnnnnnnnnnnnnnnnnnnnnnnnnnnnnnnnnnnnnnnnnnnnnnnnnnnnnnnnnnnnnnnnnnnnnnnnnnnnnnnnnnnnnnnnnnnnnnnnnnnnnnnnnnnnnnnnnnnnnnnnnnnnnnnnnnnnnnnnnnnnnnnnnnnnnnnnnnnnnnnnnnnnnnnnnnnnnnnnnnnnnnnnnnnnnnnnnnnnnnnnnnnnnnnnnnnnnnnnnnnnnnnnnnnnnnnnnnnnnnnnnnnnnnnnnnnnnnnnnnnnnnnnnnnnnnnnnnnnnnnnnnnnnnnnnnnnnnnnnnnnnnnnnnnnnnnnnnnnnnnnnnnnnnnnnnnnnnnnnnnnnnnnnnnnnnnnnnnnnnnnnnnnnnnnnnnnnnnnnnnnnnnnnnnnnnnnnnnnnnnnnnnnnnnnnnnnnnnnnnnnnnnnnnnnnnnnnnnnnnnnnnnnnnnnnnnnnnnnnnnnnnnnnnnnnnnnnnnnnnnnnnnnnnnnnnnnnnnnnnnnnnnnnnnnnnnnnnnnnnnnnnnnnnnnnnnnnnnnnnnnnnnnnnnnnnnnnnnnnnnnnnnnnnnnnnnnnnnnnnnnnnnnnnnnnnnnnnnnnnnnnnnnnnnnnnnnnnnnnnnnnnnnnnnnnnnnnnnnnnnnnnnnnnnnnnnnnnnnnnnnnnnnnnnnnnnnnnnnnnnnnnnnnnnnnnnnnnnnnnnnnnnnnnnnnnnnnnnnnnnnnnnnnnnnnnnnnnnnnnnnnnnnnnnnnnnnnnnnnnnnnnnnnnnnnnnnnnnnnnnnnnnnnnnnnnnnnnnnnnnnnnnnnnnnnnnnnnnnnnnnnnnnnnnnnnnnnnnnnnnnnnnnnnnnnnnnnnnnnnnnnnnnnnnnnnnnnnnnnnnnnnnnnnnnnnnnnnnnnnnnnnnnnnnnnnnnnnnnnnnnnnnnnnnnnnnnnnnnnnnnnnnnnnnnnnnnnnnnnnnnnnnnnnnnnnnnnnnnnnnnnnnnnnnnnnnnnnnnnnnnnnnnnnnnnnnnnnnnnnnnnnnnnnnnnnnnnnnnnnnnnnnnnnnnnnnnnnnnnnnnnnnnnnnnnnnnnnnnnnnnnnnnnnnnnnnnnnnnnnnnnnnnnnnnnnnnnnnnnnnnnnnnnnnnnnnnnnnnnnnnnnnnnnnnnnnnnnnnnnnnnnnnnnnnnnnnnnnnnnnnnnnnnnnnnnnnnnnnnnnnnnnnnnnnnnnnnnnnnnnnnnnnnnnnnnnnnnnnnnnnnnnnnnnnnnnnnnnnnnnnnnnnnnnnnnnnnnnnnnnnnnnnnnnnnnnnnnnnnnnnnnnnnnnnnnnnnnnnnnnnnnnnnnnnnnnnnnnnnnnnnnnnnnnnnnnnnnnnnnnnnnnnnnnnnnnnnnnnnnnnnnnnnnnnnnnnnnnnnnnnnnnnnnnnnnnnnnnnnnnnnnnnnnnnnnnnnnnnnnnnnnnnnnnnnnnnnnnnnnnnnnnnnnnnnnnnnnnnnnnnnnnnnnnnnnnnnnnnnnnnnnnnnnnnnnnnnnnnnnnnnnnnnnnnnnnnnnnnnnnnnnnnnnnnnnnnnnnnnnnnnnnnnnnnnnnnnnnnnnnnnnnnnnnnnnnnnnnnnnnnnnnnnnnnnnnnnnnnnnnnnnnnnnnnnnnnnnnnnnnnnnnnnnnnnnnnnnnnnnnnnnnnnnnnnnnnnnnnnnnnnnnnnnnnnnnnnnnnnnnnnnnnnnnnnnnnnnnnnnnnnnnnnnnnnnnnnnnnnnnnnnnnnnnnnnnnnnnnnnnnnnnnnnnnnnnnnnnnnnnnnnnnnnnnnnnnnnnnnnnnnnnnnnnnnnnnnnnnnnnnnnnnnnnnnnnnnnnnnnnnnnnnnnnnnnnnnnnnnnnnnnnnnnnnnnnnnnnnnnnnnnnnnnnnnnnnnnnnnnnnnnnnnnnnnnnnnnnnnnnnnnnnnnnnnnnnnnnnnnnnnnnnnnnnnnnnnnnnnnnnnnnnnnnnnnnnnnnnnnnnnnnnnnnnnnnnnnnnnnnnnnnnnnnnnnnnnnnnnnnnnnnnnnnnnnnnnnnnnnnnnnnnnnnnnnnnnnnnnnnnnnnnnnnnnnnnnnnnnnnnnnnnnnnnnnnnnnnnnnnnnnnnnnnnnnnnnnnnnnnnnnnnnnnnnnnnnnnnnnnnnnnnnnnnnnnnnnnnnnnnnnnnnnnnnnnnnnnnnnnnnnnnnnnnnnnnnnnnnnnnnnnnnnnnnnnnnnnnnnnnnnnnnnnnnnnnnnnnnnnnnnnnnnnnnnnnnnnnnnnnnnnnnnnnnnnnnnnnnnnnnnnnnnnnnnnnnnnnnnnnnnnnnnnnnnnnnnnnnnnnnnnnnnnnnnnnnnnnnnnnnnnnnnnnnnnnnnnnnnnnnnnnnnnnnnnnnnnnnnnnnnnnnnnnnnnnnnnnnnnnnnnnnnnnnnnnnnnnnnnnnnnnnnnnnnnnnnnnnnnnnnnnnnnnnnnnnnnnnnnnnnnnnnnnnnnnnnnnnnnnnnnnnnnnnnnnnnnnnnnnnnnnnnnnnnnnnnnnnnnnnnnnnnnnnnnnnnnnnnnnnnnnnnnnnnnnnnnnnnnnnnnnnnnnnnnnnnnnnnnnnnnnnnnnnnnnnnnnnnnnnnnnnnnnnnnnnnnnnnnnnnnnnnnnnnnnnnnnnnnnnnnnnnnnnnnnnnnnnnnnnnnnnnnnnnnnnnnnnnnnnnnnnnnnnnnnnnnnnnnnnnnnnnnnnnnnnnnnnnnnnnnnnnnnnnnnnnnnnnnnnnnnnnnnnnnnnnnnnnnnnnnnnnnnnnnnnnnnnnnnnnnnnnnnnnnnnnnnnnnnnnnnnnnnnnnnnnnnnnnnnnnnnnnnnnnnnnnnnnnnnnnnnnnnnnnnnnnnnnnnnnnnnnnnnnnnnnnnnnnnnnnnnnnnnnnnnnnnnnnnnnnnnnnnnnnnnnnnnnnnnnnnnnnnnnnnnnnnnnnnnnnnnnnnnnnnnnnnnnnnnnnnnnnnnnnnnnnnnnnnnnnnnnnnnnnnnnnnnnnnnnnnnnnnnnnnnnnnnnnnnnnnnnnnnnnnnnnnnnnnnnnnnnnnnnnnnnnnnnnnnnnnnnnnnnnnnnnnnnnnnnnnnnnnnnnnnnnnnnnnnnnnnnnnnnnnnnnnnnnnnnnnnnnnnnnnnnnnnnnnnnnnnnnnnnnnnnnnnnnnnnnnnnnnnnnnnnnnnnnnnnnnnnnnnnnnnnnnnnnnnnnnnnnnnnnnnnnnnnnnnnnnnnnnnnnnnnnnnnnnnnnnnnnnnnnnnnnnnnnnnnnnnnnnnnnnnnnnnnnnnnnnnnnnnnnnnnnnnnnnnnnnnnnnnnnnnnnnnnnnnnnnnnnnnnnnnnnnnnnnnnnnnnnnnnnnnnnnnnnnnnnnnnnnnnnnnnnnnnnnnnnnnnnnnnnnnnnnnnnnnnnnnnnnnnnnnnnnnnnnnnnnnnnnnnnnnnnnnnnnnnnnnnnnnnnnnnnnnnnnnnnnnnnnnnnnnnnnnnnnnnnnnnnnnnnnnnnnnnnnnnnnnnnnnnnnnnnnnnnnnnnnnnnnnnnnnnnnnnnnnnnnnnnnnnnnnnnnnnnnnnnnnnnnnnnnnnnnnnnnnnnnnnnnnnnnnnnnnnnnnnnnnnnnnnnnnnnnnnnnnnnnnnnnnnnnnnnnnnnnnnnnnnnnnnnnnnnnnnnnnnnnnnnnnnnnnnnnnnnnnnnnnnnnnnnnnnnnnnnnnnnnnnnnnnnnnnnnnnnnnnnnnnnnnnnnnnnnnnnnnnnnnnnnnnnnnnnnnnnnnnnnnnnnnnnnnnnnnnnnnnnnnnnnnnnnnnnnnnnnnnnnnnnnnnnnnnnnnnnnnnnnnnnnnnnnnnnnnnnnnnnnnnnnnnnnnnnnnnnnnnnnnnnnnnnnnnnnnnnnnnnnnnnnnnnnnnnnnnnnnnnnnnnnnnnnnnnnnnnnnnnnnnnnnnnnnnnnnnnnnnnnnnnnnnnnnnnnnnnnnnnnnnnnnnnnnnnnnnnnnnnnnnnnnnnnnnnnnnnnnnnnnnnnnnnnnnnnnnnnnnnnnnnnnnnnnnnnnnnnnnnnnnnnnnnnnnnnnnnnnnnnnnnnnnnnnnnnnnnnnnnnnnnnnnnnnnnnnnnnnnnnnnnnnnnnnnnnnnnnnnnnnnnnnnnnnnnnnnnnnnnnnnnnnnnnnnnnnnnnnnnnnnnnnnnnnnnnnnnnnnnnnnnnnnnnnnnnnnnnnnnnnnnnnnnnnnnnnnnnnnnnnnnnnnnnnnnnnnnnnnnnnnnnnnnnnnnnnnnnnnnnnnnnnnnnnnnnnnnnnnnnnnnnnnnnnnnnnnnnnnnnnnnnnnnnnnnnnnnnnnnnnnnnnnnnnnnnnnnnnnnnnnnnnnnnnnnnnnnnnnnnnnnnnnnnnnnnnnnnnnnnnnnnnnnnnnnnnnnnnnnnnnnnnnnnnnnnnnnnnnnnnnnnnnnnnnnnnnnnnnnnnnnnnnnnnnnnnnnnnnnnnnnnnnnnnnnnnnnnnnnnnnnnnnnnnnnnnnnnnnnnnnnnnnnnnnnnnnnnnnnnnnnnnnnnnnnnnnnnnnnnnnnnnnnnnnnnnnnnnnnnnnnnnnnnnnnnnnnnnnnnnnnnnnnnnnnnnnnnnnnnnnnnnnnnnnnnnnnnnnnnnnnnnnnnnnnnnnnnnnnnnnnnnnnnnnnnnnnnnnnnnnnnnnnnnnnnnnnnnnnnnnnnnnnnnnnnnnnnnnnnnnnnnnnnnnnnnnnnnnnnnnnnnnnnnnnnnnnnnnnnnnnnnnnnnnnnnnnnnnnnnnnnnnnnnnnnnnnnnnnnnnnnnnnnnnnnnnnnnnnnnnnnnnnnnnnnnnnnnnnnnnnnnnnnnnnnnnnnnnnnnnnnnnnnnnnnnnnnnnnnnnnnnnnnnnnnnnnnnnnnnnnnnnnnnnnnnnnnnnnnnnnnnnnnnnnnnnnnnnnnnnnnnnnnnnnnnnnnnnnnnnnnnnnnnnnnnnnnnnnnnnnnnnnnnnnnnnnnnnnnnnnnnnnnnnnnnnnnnnnnnnnnnnnnnnnnnnnnnnnnnnnnnnnnnnnnnnnnnnnnnnnnnnnnnnnnnnnnnnnnnnnnnnnnnnnnnnnnnnnnnnnnnnnnnnnnnnnnnnnnnnnnnnnnnnnnnnnnnnnnnnnnnnnnnnnnnnnnnnnnnnnnnnnnnnnnnnnnnnnnnnnnnnnnnnnnnnnnnnnnnnnnnnnnnnnnnnnnnnnnnnnnnnnnnnnnnnnnnnnnnnnnnnnnnnnnnnnnnnnnnnnnnnnnnnnnnnnnnnnnnnnnnnnnnnnnnnnnnnnnnnnnnnnnnnnnnnnnnnnnnnnnnnnnnnnnnnnnnnnnnnnnnnnnnnnnnnnnnnnnnnnnnnnnnnnnnnnnnnnnnnnnnnnnnnnnnnnnnnnnnnnnnnnnnnnnnnnnnnnnnnnnnnnnnnnnnnnnnnnnnnnnnnnnnnnnnnnnnnnnnnnnnnnnnnnnnnnnnnnnnnnnnnnnnnnnnnnnnnnnnnnnnnnnnnnnnnnnnnnnnnnnnnnnnnnnnnnnnnnnnnnnnnnnnnnnnnnnnnnnnnnnnnnnnnnnnnnnnnnnnnnnnnnnnnnnnnnnnnnnnnnnnnnnnnnnnnnnnnnnnnnnnnnnnnnnnnnnnnnnnnnnnnnnnnnnnnnnnnnnnnnnnnnnnnnnnnnnnnnnnnnnnnnnnnnnnnnnnnnnnnnnnnnnnnnnnnnnnnnnnnnnnnnnnnnnnnnnnnnnnnnnnnnnnnnnnnnnnnnnnnnnnnnnnnnnnnnnnnnnnnnnnnnnnnnnnnnnnnnnnnnnnnnnnnnnnnnnnnnnnnnnnnnnnnnnnnnnnnnnnnnnnnnnnnnnnnnnnnnnnnnnnnnnnnnnnnnnnnnnnnnnnnnnnnnnnnnnnnnnnnnnnnnnnnnnnnnnnnnnnnnnnnnnnnnnnnnnnnnnnnnnnnnnnnnnnnnnnnnnnnnnnnnnnnnnnnnnnnnnnnnnnnnnnnnnnnnnnnnnnnnnnnnnnnnnnnnnnnnnnnnnnnnnnnnnnnnnnnnnnnnnnnnnnnnnnnnnnnnnnnnnnnnnnnnnnnnnnnnnnnnnnnnnnnnnnnnnnnnnnnnnnnnnnnnnnnnnnnnnnnnnnnnnnnnnnnnnnnnnnnnnnnnnnnnnnnnnnnnnnnnnnnnnnnnnnnnnnnnnnnnnnnnnnnnnnnnnnnnnnnnnnnnnnnnnnnnnnnnnnnnnnnnnnnnnnnnnnnnnnnnnnnnnnnnnnnnnnnnnnnnnnnnnnnnnnnnnnnnnnnnnnnnnnnnnnnnnnnnnnnnnnnnnnnnnnnnnnnnnnnnnnnnnnnnnnnnnnnnnnnnnnnnnnnnnnnnnnnnnnnnnnnnnnnnnnnnnnnnnnnnnnnnnnnnnnnnnnnnnnnnnnnnnnnnnnnnnnnnnnnnnnnnnnnnnnnnnnnnnnnnnnnnnnnnnnnnnnnnnnnnnnnnnnnnnnnnnnnnnnnnnnnnnnnnnnnnnnnnnnnnnnnnnnnnnnnnnnnnnnnnnnnnnnnnnnnnnnnnnnnnnnnnnnnnnnnnnnnnnnnnnnnnnnnnnnnnnnnnnnnnnnnnnnnnnnnnnnnnnnnnnnnnnnnnnnnnnnnnnnnnnnnnnnnnnnnnnnnnnnnnnnnnnnnnnnnnnnnnnnnnnnnnnnnnnnnnnnnnnnnnnnnnnnnnnnnnnnnnnnnnnnnnnnnnnnnnnnnnnnnnnnnnnnnnnnnnnnnnnnnnnnnnnnnnnnnnnnnnnnnnnnnnnnnnnnnnnnnnnnnnnnnnnnnnnnnnnnnnnnnnnnnnnnnnnnnnnnnnnnnnnnnnnnnnnnnnnnnnnnnnnnnnnnnnnnnnnnnnnnnnnnnnnnnnnnnnnnnnnnnnnnnnnnnnnnnnnnnnnnnnnnnnnnnnnnnnnnnnnnnnnnnnnnnnnnnnnnnnnnnnnnnnnnnnnnnnnnnnnnnnnnnnnnnnnnnnnnnnnnnnnnnnnnnnnnnnnnnnnnnnnnnnnnnnnnnnnnnnnnnnnnnnnnnnnnnnnnnnnnnnnnnnnnnnnnnnnnnnnnnnnnnnnnnnnnnnnnnnnnnnnnnnnnnnnnnnnnnnnnnnnnnnnnnnnnnnnnnnnnnnnnnnnnnnnnnnnnnnnnnnnnnnnnnnnnnnnnnnnnnnnnnnnnnnnnnnnnnnnnnnnnnnnnnnnnnnnnnnnnnnnnnnnnnnnnnnnnnnnnnnnnnnnnnnnnnnnnnnnnnnnnnnnnnnnnnnnnnnnnnnnnnnnnnnnnnnnnnnnnnnnnnnnnnnnnnnnnnnnnnnnnnnnnnnnnnnnnnnnnnnnnnnnnnnnnnnnnnnnnnnnnnnnnnnnnnnnnnnnnnnnnnnnnnnnnnnnnnnnnnnnnnnnnnnnnnnnnnnnnnnnnnnnnnnnnnnnnnnnnnnnnnnnnnnnnnnnnnnnnnnnnnnnnnnnnnnnnnnnnnnnnnnnnnnnnnnnnnnnnnnnnnnnnnnnnnnnnnnnnnnnnnnnnnnnnnnnnnnnnnnnnnnnnnnnnnnnnnnnnnnnnnnnnnnnnnnnnnnnnnnnnnnnnnnnnnnnnnnnnnnnnnnnnnnnnnnnnnnnnnnnnnnnnnnnnnnnnnnnnnnnnnnnnnnnnnnnnnnnnnnnnnnnnnnnnnnnnnnnnnnnnnnnnnnnnnnnnnnnnnnnnnnnnnnnnnnnnnnnnnnnnnnnnnnnnnnnnnnnnnnnnnnnnnnnnnnnnnnnnnnnnnnnnnnnnnnnnnnnnnnnnnnnnnnnnnnnnnnnnnnnnnnnnnnnnnnnnnnnnnnnnnnnnnnnnnnnnnnnnnnnnnnnnnnnnnnnnnnnnnnnnnnnnnnnnnnnnnnnnnnnnnnnnnnnnnnnnnnnnnnnnnnnnnnnnnnnnnnnnnnnnnnnnnnnnnnnnnnnnnnnnnnnnnnnnnnnnnnnnnnnnnnnnnnnnnnnnnnnnnnnnnnnnnnnnnnnnnnnnnnnnnnnnnnnnnnnnnnnnnnnnnnnnnnnnnnnnnnnnnnnnnnnnnnnnnnnnnnnnnnnnnnnnnnnnnnnnnnnnnnnnnnnnnnnnnnnnnnnnnnnnnnnnnnnnnnnnnnnnnnnnnnnnnnnnnnnnnnnnnnnnnnnnnnnnnnnnnnnnnnnnnnnnnnnnnnnnnnnnnnnnnnnnnnnnnnnnnnnnnnnnnnnnnnnnnnnnnnnnnnnnnnnnnnnnnnnnnnnnnnnnnnnnnnnnnnnnnnnnnnnnnnnnnnnnnnnnnnnnnnnnnnnnnnnnnnnnnnnnnnnnnnnnnnnnnnnnnnnnnnnnnnnnnnnnnnnnnnnnnnnnnnnnnnnnnnnnnnnnnnnnnnnnnnnnnnnnnnnnnnnnnnnnnnnnnnnnnnnnnnnnnnnnnnnnnnnnnnnnnnnnnnnnnnnnnnnnnnnnnnnnnnnnnnnnnnnnnnnnnnnnnnnnnnnnnnnnnnnnnnnnnnnnnnnnnnnnnnnnnnnnnnnnnnnnnnnnnnnnnnnnnnnnnnnnnnnnnnnnnnnnnnnnnnnnnnnnnnnnnnnnnnnnnnnnnnnnnnnnnnnnnnnnnnnnnnnnnnnnnnnnnnnnnnnnnnnnnnnnnnnnnnnnnnnnnnnnnnnnnnnnnnnnnnnnnnnnnnnnnnnnnnnnnnnnnnnnnnnnnnnnnnnnnnnnnnnnnnnnnnnnnnnnnnnnnnnnnnnnnnnnnnnnnnnnnnnnnnnnnnnnnnnnnnnnnnnnnnnnnnnnnnnnnnnnnnnnnnnnnnnnnnnnnnnnnnnnnnnnnnnnnnnnnnnnnnnnnnnnnnnnnnnnnnnnnnnnnnnnnnnnnnnnnnnnnnnnnnnnnnnnnnnnnnnnnnnnnnnnnnnnnnnnnnnnnnnnnnnnnnnnnnnnnnnnnnnnnnnnnnnnnnnnnnnnnnnnnnnnnnnnnnnnnnnnnnnnnnnnnnnnnnnnnnnnnnnnnnnnnnnnnnnnnnnnnnnnnnnnnnnnnnnnnnnnnnnnnnnnnnnnnnnnnnnnnnnnnnnnnnnnnnnnnnnnnnnnnnnnnnnnnnnnnnnnnnnnnnnnnnnnnnnnnnnnnnnnnnnnnnnnnnnnnnnnnnnnnnnnnnnnnnnnnnnnnnnnnnnnnnnnnnnnnnnnnnnnnnnnnnnnnnnnnnnnnnnnnnnnnnnnnnnnnnnnnnnnnnnnnnnnnnnnnnnnnnnnnnnnnnnnnnnnnnnnnnnnnnnnnnnnnnnnnnnnnnnnnnnnnnnnnnnnnnnnnnnnnnnnnnnnnnnnnnnnnnnnnnnnnnnnnnnnnnnnnnnnnnnnnnnnnnnnnnnnnnnnnnnnnnnnnnnnnnnnnnnnnnnnnnnnnnnnnnnnnnnnnnnnnnnnnnnnnnnnnnnnnnnnnnnnnnnnnnnnnnnnnnnnnnnnnnnnnnnnnnnnnnnnnnnnnnnnnnnnnnnnnnnnnnnnnnnnnnnnnnnnnnnnnnnnnnnnnnnnnnnnnnnnnnnnnnnnnnnnnnnnnnnnnnnnnnnnnnnnnnnnnnnnnnnnnnnnnnnnnnnnnnnnnnnnnnnnnnnnnnnnnnnnnnnnnnnnnnnnnnnnnnnnnnnnnnnnnnnnnnnnnnnnnnnnnnnnnnnnnnnnnnnnnnnnnnnnnnnnnnnnnnnnnnnnnnnnnnnnnnnnnnnnnnnnnnnnnnnnnnnnnnnnnnnnnnnnnnnnnnnnnnnnnnnnnnnnnnnnnnnnnnnnnnnnnnnnnnnnnnnnnnnnnnnnnnnnnnnnnnnnnnnnnnnnnnnnnnnnnnnnnnnnnnnnnnnnnnnnnnnnnnnnnnnnnnnnnnnnnnnnnnnnnnnnnnnnnnnnnnnnnnnnnnnnnnnnnnnnnnnnnnnnnnnnnnnnnnnnnnnnnnnnnnnnnnnnnnnnnnnnnnnnnnnnnnnnnnnnnnnnnnnnnnnnnnnnnnnnnnnnnnnnnnnnnnnnnnnnnnnnnnnnnnnnnnnnnnnnnnnnnnnnnnnnnnnnnnnnnnnnnnnnnnnnnnnnnnnnnnnnnnnnnnnnnnnnnnnnnnnnnnnnnnnnnnnnnnnnnnnnnnnnnnnnnnnnnnnnnnnnnnnnnnnnnnnnnnnnnnnnnnnnnnnnnnnnnnnnnnnnnnnnnnnnnnnnnnnnnnnnnnnnnnnnnnnnnnnnnnnnnnnnnnnnnnnnnnnnnnnnnnnnnnnnnnnnnnnnnnnnnnnnnnnnnnnnnnnnnnnnnnnnnnnnnnnnnnnnnnnnnnnnnnnnnnnnnnnnnnnnnnnnnnnnnnnnnnnnnnnnnnnnnnnnnnnnnnnnnnnnnnnnnnnnnnnnnnnnnnnnnnnnnnnnnnnnnnnnnnnnnnnnnnnnnnnnnnnnnnnnnnnnnnnnnnnnnnnnnnnnnnnnnnnnnnnnnnnnnnnnnnnnnnnnnnnnnnnnnnnnnnnnnnnnnnnnnnnnnnnnnnnnnnnnnnnnnnnnnnnnnnnnnnnnnnnnnnnnnnnnnnnnnnnnnnnnnnnnnnnnnnnnnnnnnnnnnnnnnnnnnnnnnnnnnnnnnnnnnnnnnnnnnnnnnnnnnnnnnnnnnnnnnnnnnnnnnnnnnnnnnnnnnnnnnnnnnnnnnnnnnnnnnnnnnnnnnnnnnnnnnnnnnnnnnnnnnnnnnnnnnnnnnnnnnnnnnnnnnnnnnnnnnnnnnnnnnnnnnnnnnnnnnnnnnnnnnnnnnnnnnnnnnnnnnnnnnnnnnnnnnnnnnnnnnnnnnnnnnnnnnnnnnnnnnnnnnnnnnnnnnnnnnnnnnnnnnnnnnnnnnnnnnnnnnnnnnnnnnnnnnnnnnnnnnnnnnnnnnnnnnnnnnnnnnnnnnnnnnnnnnnnnnnnnnnnnnnnnnnnnnnnnnnnnnnnnnnnnnnnnnnnnnnnnnnnnnnnnnnnnnnnnnnnnnnnnnnnnnnnnnnnnnnnnnnnnnnnnnnnnnnnnnnnnnnnnnnnnnnnnnnnnnnnnnnnnnnnnnnnnnnnnnnnnnnnnnnnnnnnnnnnnnnnnnnnnnnnnnnnnnnnnnnnnnnnnnnnnnnnnnnnnnnnnnnnnnnnnnnnnnnnnnnnnnnnnnnnnnnnnnnnnnnnnnnnnnnnnnnnnnnnnnnnnnnnnnnnnnnnnnnnnnnnnnnnnnnnnnnnnnnnnnnnnnnnnnnnnnnnnnnnnnnnnnnnnnnnnnnnnnnnnnnnnnnnnnnnnnnnnnnnnnnnnnnnnnnnnnnnnnnnnnnnnnnnnnnnnnnnnnnnnnnnnnnnnnnnnnnnnnnnnnnnnnnnnnnnnnnnnnnnnnnnnnnnnnnnnnnnnnnnnnnnnnnnnnnnnnnnnnnnnnnnnnnnnnnnnnnnnnnnnnnnnnnnnnnnnnnnnnnnnnnnnnnnnnnnnnnnnnnnnnnnnnnnnnnnnnnnnnnnnnnnnnnnnnnnnnnnnnnnnnnnnnnnnnnnnnnnnnnnnnnnnnnnnnnnnnnnnnnnnnnnnnnnnnnnnnnnnnnnnnnnnnnnnnnnnnnnnnnnnnnnnnnnnnnnnnnnnnnnnnnnnnnnnnnnnnnnnnnnnnnnnnnnnnnnnnnnnnnnnnnnnnnnnnnnnnnnnnnnnnnnnnnnnnnnnnnnnnnnnnnnnnnnnnnnnnnnnnnnnnnnnnnnnnnnnnnnnnnnnnnnnnnnnnnnnnnnnnnnnnnnnnnnnnnnnnnnnnnnnnnnnnnnnnnnnnnnnnnnnnnnnnnnnnnnnnnnnnnnnnnnnnnnnnnnnnnnnnnnnnnnnnnnnnnnnnnnnnnnnnnnnnnnnnnnnnnnnnnnnnnnnnnnnnnnnnnnnnnnnnnnnnnnnnnnnnnnnnnnnnnnnnnnnnnnnnnnnnnnnnnnnnnnnnnnnnnnnnnnnnnnnnnnnnnnnnnnnnnnnnnnnnnnnnnnnnnnnnnnnnnnnnnnnnnnnnnnnnnnnnnnnnnnnnnnnnnnnnnnnnnnnnnnnnnnnnnnnnnnnnnnnnnnnnnnnnnnnnnnnnnnnnnnnnnnnnnnnnnnnnnnnnnnnnnnnnnnnnnnnnnnnnnnnnnnnnnnnnnnnnnnnnnnnnnnnnnnnnnnnnnnnnnnnnnnnnnnnnnnnnnnnnnnnnnnnnnnnnnnnnnnnnnnnnnnnnnnnnnnnnnnnnnnnnnnnnnnnnnnnnnnnnnnnnnnnnnnnnnnnnnnnnnnnnnnnnnnnnnnnnnnnnnnnnnnnnnnnnnnnnnnnnnnnnnnnnnnnnnnnnnnnnnnnnnnnnnnnnnnnnnnnnnnnnnnnnnnnnnnnnnnnnnnnnnnnnnnnnnnnnnnnnnnnnnnnnnnnnnnnnnnnnnnnnnnnnnnnnnnnnnnnnnnnnnnnnnnnnnnnnnnnnnnnnnnnnnnnnnnnnnnnnnnnnnnnnnnnnnnnnnnnnnnnnnnnnnnnnnnnnnnnnnnnnnnnnnnnnnnnnnnnnnnnnnnnnnnnnnnnnnnnnnnnnnnnnnnnnnnnnnnnnnnnnnnnnnnnnnnnnnnnnnnnnnnnnnnnnnnnnnnnnnnnnnnnnnnnnnnnnnnnnnnnnnnnnnnnnnnnnnnnnnnnnnnnnnnnnnnnnnnnnnnnnnnnnnnnnnnnnnnnnnnnnnnnnnnnnnnnnnnnnnnnnnnnnnnnnnnnnnnnnnnnnnnnnnnnnnnnnnnnnnnnnnnnnnnnnnnnnnnnnnnnnnnnnnnnnnnnnnnnnnnnnnnnnnnnnnnnnnnnnnnnnnnnnnnnnnnnnnnnnnnnnnnnnnnnnnnnnnnnnnnnnnnnnnnnnnnnnnnnnnnnnnnnnnnnnnnnnnnnnnnnnnnnnnnnnnnnnnnnnnnnnnnnnnnnnnnnnnnnnnnnnnnnnnnnnnnnnnnnnnnnnnnnnnnnnnnnnnnnnnnnnnnnnnnnnnnnnnnnnnnnnnnnnnnnnnnnnnnnnnnnnnnnnnnnnnnnnnnnnnnnnnnnnnnnnnnnnnnnnnnnnnnnnnnnnnnnnnnnnnnnnnnnnnnnnnnnnnnnnnnnnnnnnnnnnnnnnnnnnnnnnnnnnnnnnnnnnnnnnnnnnnnnnnnnnnnnnnnnnnnnnnnnnnnnnnnnnnnnnnnnnnnnnnnnnnnnnnnnnnnnnnnnnnnnnnnnnnnnnnnnnnnnnnnnnnnnnnnnnnnnnnnnnnnnnnnnnnnnnnnnnnnnnnnnnnnnnnnnnnnnnnnnnnnnnnnnnnnnnnnnnnnnnnnnnnnnnnnnnnnnnnnnnnnnnnnnnnnnnnnnnnnnnnnnnnnnnnnnnnnnnnnnnnnnnnnnnnnnnnnnnnnnnnnnnnnnnnnnnnnnnnnnnnnnnnnnnnnnnnnnnnnnnnnnnnnnnnnnnnnnnnnnnnnnnnnnnnnnnnnnnnnnnnnnnnnnnnnnnnnnnnnnnnnnnnnnnnnnnnnnnnnnnnnnnnnnnnnnnnnnnnnnnnnnnnnnnnnnnnnnnnnnnnnnnnnnnnnnnnnnnnnnnnnnnnnnnnnnnnnnnnnnnnnnnnnnnnnnnnnnnnnnnnnnnnnnnnnnnnnnnnnnnnnnnnnnnnnnnnnnnnnnnnnnnnnnnnnnnnnnnnnnnnnnnnnnnnnnnnnnnnnnnnnnnnnnnnnnnnnnnnnnnnnnnnnnnnnnnnnnnnnnnnnnnnnnnnnnnnnnnnnnnnnnnnnnnnnnnnnnnnnnnnnnnnnnnnnnnnnnnnnnnnnnnnnnnnnnnnnnnnnnnnnnnnnnnnnnnnnnnnnnnnnnnnnnnnnnnnnnnnnnnnnnnnnnnnnnnnnnnnnnnnnnnnnnnnnnnnnnnnnnnnnnnnnnnnnnnnnnnnnnnnnnnnnnnnnnnnnnnnnnnnnnnnnnnnnnnnnnnnnnnnnnnnnnnnnnnnnnnnnnnnnnnnnnnnnnnnnnnnnnnnnnnnnnnnnnnnnnnnnnnnnnnnnnnnnnnnnnnnnnnnnnnnnnnnnnnnnnnnnnnnnnnnnnnnnnnnnnnnnnnnnnnnnnnnnnnnnnnnnnnnnnnnnnnnnnnnnnnnnnnnnnnnnnnnnnnnnnnnnnnnnnnnnnnnnnnnnnnnnnnnnnnnnnnnnnnnnnnnnnnnnnnnnnnnnnnnnnnnnnnnnnnnnnnnnnnnnnnnnnnnnnnnnnnnnnnnnnnnnnnnnnnnnnnnnnnnnnnnnnnnnnnnnnnnnnnnnnnnnnnnnnnnnnnnnnnnnnnnnnnnnnnnnnnnnnnnnnnnnnnnnnnnnnnnnnnnnnnnnnnnnnnnnnnnnnnnnnnnnnnnnnnnnnnnnnnnnnnnnnnnnnnnnnnnnnnnnnnnnnnnnnnnnnnnnnnnnnnnnnnnnnnnnnnnnnnnnnnnnnnnnnnnnnnnnnnnnnnnnnnnnnnnnnnnnnnnnnnnnnnnnnnnnnnnnnnnnnnnnnnnnnnnnnnnnnnnnnnnnnnnnnnnnnnnnnnnnnnnnnnnnnnnnnnnnnnnnnnnnnnnnnnnnnnnnnnnnnnnnnnnnnnnnnnnnnnnnnnnnnnnnnnnnnnnnnnnnnnnnnnnnnnnnnnnnnnnnnnnnnnnnnnnnnnnnnnnnnnnnnnnnnnnnnnnnnnnnnnnnnnnnnnnnnnnnnnnnnnnnnnnnnnnnnnnnnnnnnnnnnnnnnnnnnnnnnnnnnnnnnnnnnnnnnnnnnnnnnnnnnnnnnnnnnnnnnnnnnnnnnnnnnnnnnnnnnnnnnnnnnnnnnnnnnnnnnnnnnnnnnnnnnnnnnnnnnnnnnnnnnnnnnnnnnnnnnnnnnnnnnnnnnnnnnnnnnnnnnnnnnnnnnnnnnnnnnnnnnnnnnnnnnnnnnnnnnnnnnnnnnnnnnnnnnnnnnnnnnnnnnnnnnnnnnnnnnnnnnnnnnnnnnnnnnnnnnnnnnnnnnnnnnnnnnnnnnnnnnnnnnnnnnnnnnnnnnnnnnnnnnnnnnnnnnnnnnnnnnnnnnnnnnnnnnnnnnnnnnnnnnnnnnnnnnnnnnnnnnnnnnnnnnnnnnnnnnnnnnnnnnnnnnnnnnnnnnnnnnnnnnnnnnnnnnnnnnnnnnnnnnnnnnnnnnnnnnnnnnnnnnnnnnnnnnnnnnnnnnnnnnnnnnnnnnnnnnnnnnnnnnnnnnnnnnnnnnnnnnnnnnnnnnnnnnnnnnnnnnnnnnnnnnnnnnnnnnnnnnnnnnnnnnnnnnnnnnnnnnnnnnnnnnnnnnnnnnnnnnnnnnnnnnnnnnnnnnnnnnnnnnnnnnnnnnnnnnnnnnnnnnnnnnnnnnnnnnnnnnnnnnnnnnnnnnnnnnnnnnnnnnnnnnnnnnnnnnnnnnnnnnnnnnnnnnnnnnnnnnnnnnnnnnnnnnnnnnnnnnnnnnnnnnnnnnnnnnnnnnnnnnnnnnnnnnnnnnnnnnnnnnnnnnnnnnnnnnnnnnnnnnnnnnnnnnnnnnnnnnnnnnnnnnnnnnnnnnnnnnnnnnnnnnnnnnnnnnnnnnnnnnnnnnnnnnnnnnnnnnnnnnnnnnnnnnnnnnnnnnnnnnnnnnnnnnnnnnnnnnnnnnnnnnnnnnnnnnnnnnnnnnnnnnnnnnnnnnnnnnnnnnnnnnnnnnnnnnnnnnnnnnnnnnnnnnnnnnnnnnnnnnnnnnnnnnnnnnnnnnnnnnnnnnnnnnnnnnnnnnnnnnnnnnnnnnnnnnnnnnnnnnnnnnnnnnnnnnnnnnnnnnnnnnnnnnnnnnnnnnnnnnnnnnnnnnnnnnnnnnnnnnnnnnnnnnnnnnnnnnnnnnnnnnnnnnnnnnnnnnnnnnnnnnnnnnnnnnnnnnnnnnnnnnnnnnnnnnnnnnnnnnnnnnnnnnnnnnnnnnnnnnnnnnnnnnnnnnnnnnnnnnnnnnnnnnnnnnnnnnnnnnnnnnnnnnnnnnnnnnnnnnnnnnnnnnnnnnnnnnnnnnnnnnnnnnnnnnnnnnnnnnnnnnnnnnnnnnnnnnnnnnnnnnnnnnnnnnnnnnnnnnnnnnnnnnnnnnnnnnnnnnnnnnnnnnnnnnnnnnnnnnnnnnnnnnnnnnnnnnnnnnnnnnnnnnnnnnnnnnnnnnnnnnnnnnnnnnnnnnnnnnnnnnnnnnnnnnnnnnnnnnnnnnnnnnnnnnnnnnnnnnnnnnnnnnnnnnnnnnnnnnnnnnnnnnnnnnnnnnnnnnnnnnnnnnnnnnnnnnnnnnnnnnnnnnnnnnnnnnnnnnnnnnnnnnnnnnnnnnnnnnnnnnnnnnnnnnnnnnnnnnnnnnnnnnnnnnnnnnnnnnnnnnnnnnnnnnnnnnnnnnnnnnnnnnnnnnnnnnnnnnnnnnnnnnnnnnnnnnnnnnnnnnnnnnnnnnnnnnnnnnnnnnnnnnnnnnnnnnnnnnnnnnnnnnnnnnnnnnnnnnnnnnnnnnnnnnnnnnnnnnnnnnnnnnnnnnnnnnnnnnnnnnnnnnnnnnnnnnnnnnnnnnnnnnnnnnnnnnnnnnnnnnnnnnnnnnnnnnnnnnnnnnnnnnnnnnnnnnnnnnnnnnnnnnnnnnnnnnnnnnnnnnnnnnnnnnnnnnnnnnnnnnnnnnnnnnnnnnnnnnnnnnnnnnnnnnnnnnnnnnnnnnnnnnnnnnnnnnnnnnnnnnnnnnnnnnnnnnnnnnnnnnnnnnnnnnnnnnnnnnnnnnnnnnnnnnnnnnnnnnnnnnnnnnnnnnnnnnnnnnnnnnnnnnnnnnnnnnnnnnnnnnnnnnnnnnnnnnnnnnnnnnnnnnnnnnnnnnnnnnnnnnnnnnnnnnnnnnnnnnnnnnnnnnnnnnnnnnnnnnnnnnnnnnnnnnnnnnnnnnnnnnnnnnnnnnnnnnnnnnnnnnnnnnnnnnnnnnnnnnnnnnnnnnnnnnnnnnnnnnnnnnnnnnnnnnnnnnnnnnnnnnnnnnnnnnnnnnnnnnnnnnnnnnnnnnnnnnnnnnnnnnnnnnnnnnnnnnnnnnnnnnnnnnnnnnnnnnnnnnnnnnnnnnnnnnnnnnnnnnnnnnnnnnnnnnnnnnnnnnnnnnnnnnnnnnnnnnnnnnnnnnnnnnnnnnnnnnnnnnnnnnnnnnnnnnnnnnnnnnnnnnnnnnnnnnnnnnnnnnnnnnnnnnnnnnnnnnnnnnnnnnnnnnnnnnnnnnnnnnnnnnnnnnnnnnnnnnnnnnnnnnnnnnnnnnnnnnnnnnnnnnnnnnnnnnnnnnnnnnnnnnnnnnnnnnnnnnnnnnnnnnnnnnnnnnnnnnnnnnnnnnnnnnnnnnnnnnnnnnnnnnnnnnnnnnnnnnnnnnnnnnnnnnnnnnnnnnnnnnnnnnnnnnnnnnnnnnnnnnnnnnnnnnnnnnnnnnnnnnnnnnnnnnnnnnnnnnnnnnnnnnnnnnnnnnnnnnnnnnnnnnnnnnnnnnnnnnnnnnnnnnnnnnnnnnnnnnnnnnnnnnnnnnnnnnnnnnnnnnnnnnnnnnnnnnnnnnnnnnnnnnnnnnnnnnnnnnnnnnnnnnnnnnnnnnnnnnnnnnnnnnnnnnnnnnnnnnnnnnnnnnnnnnnnnnnnnnnnnnnnnnnnnnnnnnnnnnnnnnnnnnnnnnnnnnnnnnnnnnnnnnnnnnnnnnnnnnnnnnnnnnnnnnnnnnnnnnnnnnnnnnnnnnnnnnnnnnnnnnnnnnnnnnnnnnnnnnnnnnnnnnnnnnnnnnnnnnnnnnnnnnnnnnnnnnnnnnnnnnnnnnnnnnnnnnnnnnnnnnnnnnnnnnnnnnnnnnnnnnnnnnnnnnnnnnnnnnnnnnnnnnnnnnnnnnnnnnnnnnnnnnnnnnnnnnnnnnnnnnnnnnnnnnnnnnnnnnnnnnnnnnnnnnnnnnnnnnnnnnnnnnnnnnnnnnnnnnnnnnnnnnnnnnnnnnnnnnnnnnnnnnnnnnnnnnnnnnnnnnnnnnnnnnnnnnnnnnnnnnnnnnnnnnnnnnnnnnnnnnnnnnnnnnnnnnnnnnnnnnnnnnnnnnnnnnnnnnnnnnnnnnnnnnnnnnnnnnnnnnnnnnnnnnnnnnnnnnnnnnnnnnnnnnnnnnnnnnnnnnnnnnnnnnnnnnnnnnnnnnnnnnnnnnnnnnnnnnnnnnnnnnnnnnnnnnnnnnnnnnnnnnnnnnnnnnnnnnnnnnnnnnnnnnnnnnnnnnnnnnnnnnnnnnnnnnnnnnnnnnnnnnnnnnnnnnnnnnnnnnnnnnnnnnnnnnnnnnnnnnnnnnnnnnnnnnnnnnnnnnnnnnnnnnnnnnnnnnnnnnnnnnnnnnnnnnnnnnnnnnnnnnnnnnnnnnnnnnnnnnnnnnnnnnnnnnnnnnnnnnnnnnnnnnnnnnnnnnnnnnnnnnnnnnnnnnnnnnnnnnnnnnnnnnnnnnnnnnnnnnnnnnnnnnnnnnnnnnnnnnnnnnnnnnnnnnnnnnnnnnnnnnnnnnnnnnnnnnnnnnnnnnnnnnnnnnnnnnnnnnnnnnnnnnnnnnnnnnnnnnnnnnnnnnnnnnnnnnnnnnnnnnnnnnnnnnnnnnnnnnnnnnnnnnnnnnnnnnnnnnnnnnnnnnnnnnnnnnnnnnnnnnnnnnnnnnnnnnnnnnnnnnnnnnnnnnnnnnnnnnnnnnnnnnnnnnnnnnnnnnnnnnnnnnnnnnnnnnnnnnnnnnnnnnnnnnnnnnnnnnnnnnnnnnnnnnnnnnnnnnnnnnnnnnnnnnnnnnnnnnnnnnnnnnnnnnnnnnnnnnnnnnnnnnnnnnnnnnnnnnnnnnnnnnnnnnnnnnnnnnnnnnnnnnnnnnnnnnnnnnnnnnnnnnnnnnnnnnnnnnnnnnnnnnnnnnnnnnnnnnnnnnnnnnnnnnnnnnnnnnnnnnnnnnnnnnnnnnnnnnnnnnnnnnnnnnnnnnnnnnnnnnnnnnnnnnnnnnnnnnnnnnnnnnnnnnnnnnnnnnnnnnnnnnnnnnnnnnnnnnnnnnnnnnnnnnnnnnnnnnnnnnnnnnnnnnnnnnnnnnnnnnnnnnnnnnnnnnnnnnnnnnnnnnnnnnnnnnnnnnnnnnnnnnnnnnnnnnnnnnnnnnnnnnnnnnnnnnnnnnnnnnnnnnnnnnnnnnnnnnnnnnnnnnnnnnnnnnnnnnnnnnnnnnnnnnnnnnnnnnnnnnnnnnnnnnnnnnnnnnnnnnnnnnnnnnnnnnnnnnnnnnnnnnnnnnnnnnnnnnnnnnnnnnnnnnnnnnnnnnnnnnnnnnnnnnnnnnnnnnnnnnnnnnnnnnnnnnnnnnnnnnnnnnnnnnnnnnnnnnnnnnnnnnnnnnnnnnnnnnnnnnnnnnnnnnnnnnnnnnnnnnnnnnnnnnnnnnnnnnnnnnnnnnnnnnnnnnnnnnnnnnnnnnnnnnnnnnnnnnnnnnnnnnnnnnnnnnnnnnnnnnnnnnnnnnnnnnnnnnnnnnnnnnnnnnnnnnnnnnnnnnnnnnnnnnnnnnnnnnnnnnnnnnnnnnnnnnnnnnnnnnnnnnnnnnnnnnnnnnnnnnnnnnnnnnnnnnnnnnnnnnnnnnnnnnnnnnnnnnnnnnnnnnnnnnnnnnnnnnnnnnnnnnnnnnnnnnnnnnnnnnnnnnnnnnnnnnnnnnnnnnnnnnnnnnnnnnnnnnnnnnnnnnnnnnnnnnnnnnnnnnnnnnnnnnnnnnnnnnnnnnnnnnnnnnnnnnnnnnnnnnnnnnnnnnnnnnnnnnnnnnnnnnnnnnnnnnnnnnnnnnnnnnnnnnnnnnnnnnnnnnnnnnnnnnnnnnnnnnnnnnnnnnnnnnnnnnnnnnnnnnnnnnnnnnnnnnnnnnnnnnnnnnnnnnnnnnnnnnnnnnnnnnnnnnnnnnnnnnnnnnnnnnnnnnnnnnnnnnnnnnnnnnnnnnnnnnnnnnnnnnnnnnnnnnnnnnnnnnnnnnnnnnnnnnnnnnnnnnnnnnnnnnnnnnnnnnnnnnnnnnnnnnnnnnnnnnnnnnnnnnnnnnnnnnnnnnnnnnnnnnnnnnnnnnnnnnnnnnnnnnnnnnnnnnnnnnnnnnnnnnnnnnnnnnnnnnnnnnnnnnnnnnnnnnnnnnnnnnnnnnnnnnnnnnnnnnnnnnnnnnnnnnnnnnnnnnnnnnnnnnnnnnnnnnnnnnnnnnnnnnnnnnnnnnnnnnnnnnnnnnnnnnnnnnnnnnnnnnnnnnnnnnnnnnnnnnnnnnnnnnnnnnnnnnnnnnnnnnnnnnnnnnnnnnnnnnnnnnnnnnnnnnnnnnnnnnnnnnnnnnnnnnnnnnnnnnnnnnnnnnnnnnnnnnnnnnnnnnnnnnnnnnnnnnnnnnnnnnnnnnnnnnnnnnnnnnnnnnnnnnnnnnnnnnnnnnnnnnnnnnnnnnnnnnnnnnnnnnnnnnnnnnnnnnnnnnnnnnnnnnnnnnnnnnnnnnnnnnnnnnnnnnnnnnnnnnnnnnnnnnnnnnnnnnnnnnnnnnnnnnnnnnnnnnnnnnnnnnnnnnnnnnnnnnnnnnnnnnnnnnnnnnnnnnnnnnnnnnnnnnnnnnnnnnnnnnnnnnnnnnnnnnnnnnnnnnnnnnnnnnnnnnnnnnnnnnnnnnnnnnnnnnnnnnnnnnnnnnnnnnnnnnnnnnnnnnnnnnnnnnnnnnnnnnnnnnnnnnnnnnnnnnnnnnnnnnnnnnnnnnnnnnnnnnnnnnnnnnnnnnnnnnnnnnnnnnnnnnnnnnnnnnnnnnnnnnnnnnnnnnnnnnnnnnnnnnnnnnnnnnnnnnnnnnnnnnnnnnnnnnnnnnnnnnnnnnnnnnnnnnnnnnnnnnnnnnnnnnnnnnnnnnnnnnnnnnnnnnnnnnnnnnnnnnnnnnnnnnnnnnnnnnnnnnnnnnnnnnnnnnnnnnnnnnnnnnnnnnnnnnnnnnnnnnnnnnnnnnnnnnnnnnnnnnnnnnnnnnnnnnnnnnnnnnnnnnnnnnnnnnnnnnnnnnnnnnnnnnnnnnnnnnnnnnnnnnnnnnnnnnnnnnnnnnnnnnnnnnnnnnnnnnnnnnnnnnnnnnnnnnnnnnnnnnnnnnnnnnnnnnnnnnnnnnnnnnnnnnnnnnnnnnnnnnnnnnnnnnnnnnnnnnnnnnnnnnnnnnnnnnnnnnnnnnnnnnnnnnnnnnnnnnnnnnnnnnnnnnnnnnnnnnnnnnnnnnnnnnnnnnnnnnnnnnnnnnnnnnnnnnnnnnnnnnnnnnnnnnnnnnnnnnnnnnnnnnnnnnnnnnnnnnnnnnnnnnnnnnnnnnnnnnnnnnnnnnnnnnnnnnnnnnnnnnnnnnnnnnnnnnnnnnnnnnnnnnnnnnnnnnnnnnnnnnnnnnnnnnnnnnnnnnnnnnnnnnnnnnnnnnnnnnnnnnnnnnnnnnnnnnnnnnnnnnnnnnnnnnnnnnnnnnnnnnnnnnnnnnnnnnnnnnnnnnnnnnnnnnnnnnnnnnnnnnnnnnnnnnnnnnnnnnnnnnnnnnnnnnnnnnnnnnnnnnnnnnnnnnnnnnnnnnnnnnnnnnnnnnnnnnnnnnnnnnnnnnnnnnnnnnnnnnnnnnnnnnnnnnnnnnnnnnnnnnnnnnnnnnnnnnnnnnnnnnnnnnnnnnnnnnnnnnnnnnnnnnnnnnnnnnnnnnnnnnnnnnnnnnnnnnnnnnnnnnnnnnnnnnnnnnnnnnnnnnnnnnnnnnnnnnnnnnnnnnnnnnnnnnnnnnnnnnnnnnnnnnnnnnnnnnnnnnnnnnnnnnnnnnnnnnnnnnnnnnnnnnnnnnnnnnnnnnnnnnnnnnnnnnnnnnnnnnnnnnnnnnnnnnnnnnnnnnnnnnnnnnnnnnnnnnnnnnnnnnnnnnnnnnnnnnnnnnnnnnnnnnnnnnnnnnnnnnnnnnnnnnnnnnnnnnnnnnnnnnnnnnnnnnnnnnnnnnnnnnnnnnnnnnnnnnnnnnnnnnnnnnnnnnnnnnnnnnnnnnnnnnnnnnnnnnnnnnnnnnnnnnnnnnnnnnnnnnnnnnnnnnnnnnnnnnnnnnnnnnnnnnnnnnnnnnnnnnnnnnnnnnnnnnnnnnnnnnnnnnnnnnnnnnnnnnnnnnnnnnnnnnnnnnnnnnnnnnnnnnnnnnnnnnnnnnnnnnnnnnnnnnnnnnnnnnnnnnnnnnnnnnnnnnnnnnnnnnnnnnnnnnnnnnnnnnnnnnnnnnnnnnnnnnnnnnnnnnnnnnnnnnnnnnnnnnnnnnnnnnnnnnnnnnnnnnnnnnnnnnnnnnnnnnnnnnnnnnnnnnnnnnnnnnnnnnnnnnnnnnnnnnnnnnnnnnnnnnnnnnnnnnnnnnnnnnnnnnnnnnnnnnnnnnnnnnnnnnnnnnnnnnnnnnnnnnnnnnnnnnnnnnnnnnnnnnnnnnnnnnnnnnnnnnnnnnnnnnnnnnnnnnnnnnnnnnnnnnnnnnnnnnnnnnnnnnnnnnnnnnnnnnnnnnnnnnnnnnnnnnnnnnnnnnnnnnnnnnnnnnnnnnnnnnnnnnnnnnnnnnnnnnnnnnnnnnnnnnnnnnnnnnnnnnnnnnnnnnnnnnnnnnnnnnnnnnnnnnnnnnnnnnnnnnnnnnnnnnnnnnnnnnnnnnnnnnnnnnnnnnnnnnnnnnnnnnnnnnnnnnnnnnnnnnnnnnnnnnnnnnnnnnnnnnnnnnnnnnnnnnnnnnnnnnnnnnnnnnnnnnnnnnnnnnnnnnnnnnnnnnnnnnnnnnnnnnnnnnnnnnnnnnnnnnnnnnnnnnnnnnnnnnnnnnnnnnnnnnnnnnnnnnnnnnnnnnnnnnnnnnnnnnnnnnnnnnnnnnnnnnnnnnnnnnnnnnnnnnnnnnnnnnnnnnnnnnnnnnnnnnnnnnnnnnnnnnnnnnnnnnnnnnnnnnnnnnnnnnnnnnnnnnnnnnnnnnnnnnnnnnnnnnnnnnnnnnnnnnnnnnnnnnnnnnnnnnnnnnnnnnnnnnnnnnnnnnnnnnnnnnnnnnnnnnnnnnnnnnnnnnnnnnnnnnnnnnnnnnnnnnnnnnnnnnnnnnnnnnnnnnnnnnnnnnnnnnnnnnnnnnnnnnnnnnnnnnnnnnnnnnnnnnnnnnnnnnnnnnnnnnnnnnnnnnnnnnnnnnnnnnnnnnnnnnnnnnnnnnnnnnnnnnnnnnnnnnnnnnnnnnnnnnnnnnnnnnnnnnnnnnnnnnnnnnnnnnnnnnnnnnnnnnnnnnnnnnnnnnnnnnnnnnnnnnnnnnnnnnnnnnnnnnnnnnnnnnnnnnnnnnnnnnnnnnnnnnnnnnnnnnnnnnnnnnnnnnnnnnnnnnnnnnnnnnnnnnnnnnnnnnnnnnnnnnnnnnnnnnnnnnnnnnnnnnnnnnnnnnnnnnnnnnnnnnnnnnnnnnnnnnnnnnnnnnnnnnnnnnnnnnnnnnnnnnnnnnnnnnnnnnnnnnnnnnnnnnnnnnnnnnnnnnnnnnnnnnnnnnnnnnnnnnnnnnnnnnnnnnnnnnnnnnnnnnnnnnnnnnnnnnnnnnnnnnnnnnnnnnnnnnnnnnnnnnnnnnnnnnnnnnnnnnnnnnnnnnnnnnnnnnnnnnnnnnnnnnnnnnnnnnnnnnnnnnnnnnnnnnnnnnnnnnnnnnnnnnnnnnnnnnnnnnnnnnnnnnnnnnnnnnnnnnnnnnnnnnnnnnnnnnnnnnnnnnnnnnnnnnnnnnnnnnnnnnnnnnnnnnnnnnnnnnnnnnnnnnnnnnnnnnnnnnnnnnnnnnnnnnnnnnnnnnnnnnnnnnnnnnnnnnnnnnnnnnnnnnnnnnnnnnnnnnnnnnnnnnnnnnnnnnnnnnnnnnnnnnnnnnnnnnnnnnnnnnnnnnnnnnnnnnnnnnnnnnnnnnnnnnnnnnnnnnnnnnnnnnnnnnnnnnnnnnnnnnnnnnnnnnnnnnnnnnnnnnnnnnnnnnnnnnnnnnnnnnnnnnnnnnnnnnnnnnnnnnnnnnnnnnnnnnnnnnnnnnnnnnnnnnnnnnnnnnnnnnnnnnnnnnnnnnnnnnnnnnnnnnnnnnnnnnnnnnnnnnnnnnnnnnnnnnnnnnnnnnnnnnnnnnnnnnnnnnnnnnnnnnnnnnnnnnnnnnnnnnnnnnnnnnnnnnnnnnnnnnnnnnnnnnnnnnnnnnnnnnnnnnnnnnnnnnnnnnnnnnnnnnnnnnnnnnnnnnnnnnnnnnnnnnnnnnnnnnnnnnnnnnnnnnnnnnnnnnnnnnnnnnnnnnnnnnnnnnnnnnnnnnnnnnnnnnnnnnnnnnnnnnnnnnnnnnnnnnnnnnnnnnnnnnnnnnnnnnnnnnnnnnnnnnnnnnnnnnnnnnnnnnnnnnnnnnnnnnnnnnnnnnnnnnnnnnnnnnnnnnnnnnnnnnnnnnnnnnnnnnnnnnnnnnnnnnnnnnnnnnnnnnnnnnnnnnnnnnnnnnnnnnnnnnnnnnnnnnnnnnnnnnnnnnnnnnnnnnnnnnnnnnnnnnnnnnnnnnnnnnnnnnnnnnnnnnnnnnnnnnnnnnnnnnnnnnnnnnnnnnnnnnnnnnnnnnnnnnnnnnnnnnnnnnnnnnnnnnnnnnnnnnnnnnnnnnnnnnnnnnnnnnnnnnnnnnnnnnnnnnnnnnnnnnnnnnnnnnnnnnnnnnnnnnnnnnnnnnnnnnnnnnnnnnnnnnnnnnnnnnnnnnnnnnnnnnnnnnnnnnnnnnnnnnnnnnnnnnnnnnnnnnnnnnnnnnnnnnnnnnnnnnnnnnnnnnnnnnnnnnnnnnnnnnnnnnnnnnnnnnnnnnnnnnnnnnnnnnnnnnnnnnnnnnnnnnnnnnnnnnnnnnnnnnnnnnnnnnnnnnnnnnnnnnnnnnnnnnnnnnnnnnnnnnnnnnnnnnnnnnnnnnnnnnnnnnnnnnnnnnnnnnnnnnnnnnnnnnnnnnnnnnnnnnnnnnnnnnnnnnnnnnnnnnnnnnnnnnnnnnnnnnnnnnnnnnnnnnnnnnnnnnnnnnnnnnnnnnnnnnnnnnnnnnnnnnnnnnnnnnnnnnnnnnnnnnnnnnnnnnnnnnnnnnnnnnnnnnnnnnnnnnnnnnnnnnnnnnnnnnnnnnnnnnnnnnnnnnnnnnnnnnnnnnnnnnnnnnnnnnnnnnnnnnnnnnnnnnnnnnnnnnnnnnnnnnnnnnnnnnnnnnnnnnnnnnnnnnnnnnnnnnnnnnnnnnnnnnnnnnnnnnnnnnnnnnnnnnnnnnnnnnnnnnnnnnnnnnnnnnnnnnnnnnnnnnnnnnnnnnnnnnnnnnnnnnnnnnnnnnnnnnnnnnnnnnnnnnnnnnnnnnnnnnnnnnnnnnnnnnnnnnnnnnnnnnnnnnnnnnnnnnnnnnnnnnnnnnnnnnnnnnnnnnnnnnnnnnnnnnnnnnnnnnnnnnnnnnnnnnnnnnnnnnnnnnnnnnnnnnnnnnnnnnnnnnnnnnnnnnnnnnnnnnnnnnnnnnnnnnnnnnnnnnnnnnnnnnnnnnnnnnnnnnnnnnnnnnnnnnnnnnnnnnnnnnnnnnnnnnnnnnnnnnnnnnnnnnnnnnnnnnnnnnnnnnnnnnnnnnnnnnnnnnnnnnnnnnnnnnnnnnnnnnnnnnnnnnnnnnnnnnnnnnnnnnnnnnnnnnnnnnnnnnnnnnnnnnnnnnnnnnnnnnnnnnnnnnnnnnnnnnnnnnnnnnnnnnnnnnnnnnnnnnnnnnnnnnnnnnnnnnnnnnnnnnnnnnnnnnnnnnnnnnnnnnnnnnnnnnnnnnnnnnnnnnnnnnnnnnnnnnnnnnnnnnnnnnnnnnnnnnnnnnnnnnnnnnnnnnnnnnnnnnnnnnnnnnnnnnnnnnnnnnnnnnnnnnnnnnnnnnnnnnnnnnnnnnnnnnnnnnnnnnnnnnnnnnnnnnnnnnnnnnnnnnnnnnnnnnnnnnnnnnnnnnnnnnnnnnnnnnnnnnnnnnnnnnnnnnnnnnnnnnnnnnnnnnnnnnnnnnnnnnnnnnnnnnnnnnnnnnnnnnnnnnnnnnnnnnnnnnnnnnnnnnnnnnnnnnnnnnnnnnnnnnnnnnnnnnnnnnnnnnnnnnnnnnnnnnnnnnnnnnnnnnnnnnnnnnnnnnnnnnnnnnnnnnnnnnnnnnnnnnnnnnnnnnnnnnnnnnnnnnnnnnnnnnnnnnnnnnnnnnnnnnnnnnnnnnnnnnnnnnnnnnnnnnnnnnnnnnnnnnnnnnnnnnnnnnnnnnnnnnnnnnnnnnnnnnnnnnnnnnnnnnnnnnnnnnnnnnnnnnnnnnnnnnnnnnnnnnnnnnnnnnnnnnnnnnnnnnnnnnnnnnnnnnnnnnnnnnnnnnnnnnnnnnnnnnnnnnnnnnnnnnnnnnnnnnnnnnnnnnnnnnnnnnnnnnnnnnnnnnnnnnnnnnnnnnnnnnnnnnnnnnnnnnnnnnnnnnnnnnnnnnnnnnnnnnnnnnnnnnnnnnnnnnnnnnnnnnnnnnnnnnnnnnnnnnnnnnnnnnnnnnnnnnnnnnnnnnnnnnnnnnnnnnnnnnnnnnnnnnnnnnnnnnnnnnnnnnnnnnnnnnnnnnnnnnnnnnnnnnnnnnnnnnnnnnnnnnnnnnnnnnnnnnnnnnnnnnnnnnnnnnnnnnnnnnnnnnnnnnnnnnnnnnnnnnnnnnnnnnnnnnnnnnnnnnnnnnnnnnnnnnnnnnnnnnnnnnnnnnnnnnnnnnnnnnnnnnnnnnnnnnnnnnnnnnnnnnnnnnnnnnnnnnnnnnnnnnnnnnnnnnnnnnnnnnnnnnnnnnnnnnnnnnnnnnnnnnnnnnnnnnnnnnnnnnnnnnnnnnnnnnnnnnnnnnnnnnnnnnnnnnnnnnnnnnnnnnnnnnnnnnnnnnnnnnnnnnnnnnnnnnnnnnnnnnnnnnnnnnnnnnnnnnnnnnnnnnnnnnnnnnnnnnnnnnnnnnnnnnnnnnnnnnnnnnnnnnnnnnnnnnnnnnnnnnnnnnnnnnnnnnnnnnnnnnnnnnnnnnnnnnnnnnnnnnnnnnnnnnnnnnnnnnnnnnnnnnnnnnnnnnnnnnnnnnnnnnnnnnnnnnnnnnnnnnnnnnnnnnnnnnnnnnnnnnnnnnnnnnnnnnnnnnnnnnnnnnnnnnnnnnnnnnnnnnnnnnnnnnnnnnnnnnnnnnnnnnnnnnnnnnnnnnnnnnnnnnnnnnnnnnnnnnnnnnnnnnnnnnnnnnnnnnnnnnnnnnnnnnnnnnnnnnnnnnnnnnnnnnnnnnnnnnnnnnnnnnnnnnnnnnnnnnnnnnnnnnnnnnnnnnnnnnnnnnnnnnnnnnnnnnnnnnnnnnnnnnnnnnnnnnnnnnnnnnnnnnnnnnnnnnnnnnnnnnnnnnnnnnnnnnnnnnnnnnnnnnnnnnnnnnnnnnnnnnnnnnnnnnnnnnnnnnnnnnnnnnnnnnnnnnnnnnnnnnnnnnnnnnnnnnnnnnnnnnnnnnnnnnnnnnnnnnnnnnnnnnnnnnnnnnnnnnnnnnnnnnnnnnnnnnnnnnnnnnnnnnnnnnnnnnnnnnnnnnnnnnnnnnnnnnnnnnnnnnnnnnnnnnnnnnnnnnnnnnnnnnnnnnnnnnnnnnnnnnnnnnnnnnnnnnnnnnnnnnnnnnnnnnnnnnnnnnnnnnnnnnnnnnnnnnnnnnnnnnnnnnnnnnnnnnnnnnnnnnnnnnnnnnnnnnnnnnnnnnnnnnnnnnnnnnnnnnnnnnnnnnnnnnnnnnnnnnnnnnnnnnnnnnnnnnnnnnnnnnnnnnnnnnnnnnnnnnnnnnnnnnnnnnnnnnnnnnnnnnnnnnnnnnnnnnnnnnnnnnnnnnnnnnnnnnnnnnnnnnnnnnnnnnnnnnnnnnnnnnnnnnnnnnnnnnnnnnnnnnnnnnnnnnnnnnnnnnnnnnnnnnnnnnnnnnnnnnnnnnnnnnnnnnnnnnnnnnnnnnnnnnnnnnnnnnnnnnnnnnnnnnnnnnnnnnnnnnnnnnnnnnnnnnnnnnnnnnnnnnnnnnnnnnnnnnnnnnnnnnnnnnnnnnnnnnnnnnnnnnnnnnnnnnnnnnnnnnnnnnnnnnnnnnnnnnnnnnnnnnnnnnnnnnnnnnnnnnnnnnnnnnnnnnnnnnnnnnnnnnnnnnnnnnnnnnnnnnnnnnnnnnnnnnnnnnnnnnnnnnnnnnnnnnnnnnnnnnnnnnnnnnnnnnnnnnnnnnnnnnnnnnnnnnnnnnnnnnnnnnnnnnnnnnnnnnnnnnnnnnnnnnnnnnnnnnnnnnnnnnnnnnnnnnnnnnnnnnnnnnnnnnnnnnnnnnnnnnnnnnnnnnnnnnnnnnnnnnnnnnnnnnnnnnnnnnnnnnnnnnnnnnnnnnnnnnnnnnnnnnnnnnnnnnnnnnnnnnnnnnnnnnnnnnnnnnnnnnnnnnnnnnnnnnnnnnnnnnnnnnnnnnnnnnnnnnnnnnnnnnnnnnnnnnnnnnnnnnnnnnnnnnnnnnnnnnnnnnnnnnnnnnnnnnnnnnnnnnnnnnnnnnnnnnnnnnnnnnnnnnnnnnnnnnnnnnnnnnnnnnnnnnnnnnnnnnnnnnnnnnnnnnnnnnnnnnnnnnnnnnnnnnnnnnnnnnnnnnnnnnnnnnnnnnnnnnnnnnnnnnnnnnnagcattctcagaaacttctttgtgatgtgtgtcctcaactgacagagttgaacatgtcttttgagagagcagttctgaaacactctttctgtggaacctgcaagtggatatttggctggctttgacgatttcgttggaaacgggaatacatataaaaagcagacagcagcgttctgagaaactacttggtgatgtttgcatccaagtcacagaatggaacgttccctttcacagaacaggtttgaaacactccttttgtcgtatctggaagtgtccatttggagcgcattcaggcttgtgttggaaaaggaaatatcttcccataaaaatcagacagaagccttctcggcaacttgtttgtgatgtgtgccctctactaacagagtcgaacctttctattcatagagcagttttgaaacacactttttgtagaatctgcaggagcatatttgcatatctttgaggatttcgttggaaacgggattgtcttcagataaaatccagacagaagcattctcagaaacttccttgggatgtttgcatacaagtcacagaggagaacatgccctttcgtagagaaggtttgaaacactctctttgcagtatctggaagtggacatttggagcagtttcaggcctatgctgaaaaaggaaatatcttcccttaacaactggacagaagcattctcagaaactagtttctgatgtgtgtcctcaactaacacagttgaacatttcttttgacagaacagttttgaaacactctttttgtggattctgcaagtggatatttggctagagttgcggatttcgttggaaacgggattacatataaaaagcagacagcagcattctcagcaatttctttgtgatgtttgcattcaagtcacagaattgaacattccctttcacaaagcaggtttgaaacactctttttgtagtgtctgtaactggacttttggagcgctttccggcctaaggtgaaaaaggacatatcttcccataaaaactagacagaagcattctcagaaacttactcgtgatgtgtgtcctcaactaacggggtagaacctttcttttgattgagcagttttgaaacactctttttgtagaatctgcaagtggatatttggatagctttgaggatttcattggaaacgggaatatcttcatataaaatctagacagaagcattctcagaaacttccttgtgatggttgcattcaagtcacggagttgaacattggctttcatagagcaggttggaaacactctttttccattccctggaagtggacatttggagcgctttgaggcctttggtgaaaaaggaaatatcttcccataaaaactagacagaagcattctcagaaacttctttgtgatgtgtgtcctcaactgacagagttgaacatgtcttttgagagagcagttctgaaacactctttctgtggaacctgcaagtggatatttggctggctttgacgatttcgttggaaacgggaatacatataaaaagcagacagcagcgttctgagaaacttcttggtgatgtttgcattcaagtcacagaattgaacattccctttgatggaacaggtttgaaacactccttttctcatatctggaagtgtccattcggagcgcattcaggcttgtgttgaaaaaggatatatcttcccataacaactagacagaagccttctcggcaacttgtttgtgatgtgtgccctctactaacagagtcgaacctttctattcatagagcagttttgaaacactctttttgtagaatctgcaggagcatatttgcatatctttgaggatttcgttggaaacgggattgtcttcagataaaatccagacagaagcattctcagaaacttctttgggatgtttgcattgacgtcactgaggagaacatgccctttcgtagagaaggtttgaaacactctctttgcagtatctggaagtggacatttgaagcggtttcaggcctatgttgaaaaaggaaatatcttcccgtaacaactggacagaagcattctcagaagctagtctctgatgtgtgtcctcaactaacagagttgaacatttctttggagagtatagttttgaaacactctttttgtggagtctgcaagtggatatttggctggatttgaggatttcgttggaaacgggataaggtataaaaagcagacagcagcattctcagcaacttctttgtgatctttgcattcaagttacagaattgaacattccctttcacagagcaggtttgaaacactctttttgtagtgtctgtaactggacttttggagcgctttccggcctaaggtgaaaaaggacatatcttcccataaaaactagacagaagcattctcagaaacttactcgtgatgtgtgtcctcaattaacggagtcgaacctttcttttgatagagcagttttgaaacactccttttgtagaatctgcaagtggatattttgatagctttgaggatttcgttggaaacgggaatatcttcctataaaatctagacagaagaattctcagaaacttccttgtgatggttgcattcaattcacagagttgagcattcgctttcatagagcaggtgggaaatactctttttccattctctggaagtggacatttggagcgcttcgaggcctatggtgaaaaaggaaacatcttcccatcaaaactagacattagcattctcagaaacttatttgtgatgtgtgtcctcaactgacagagttgaacatttcttttgagagggcagttttgaaacactctttttgtggaatctgcaagtggatatttggctggctttgacgatttccttggaaacgggaatacatataaaaagcagacagcagcgttatgagaaactacttgttgatgtttgcattcaagtcacagaatggaacgttccctttcatagaacaggtttgaaacactccttttgtcgtatctggaagtgtccatttggatcgcattcaggcttgtgttgaaaaaggaaatatcttcccataaaaactagacagaagccttctcggcaacttgtttgtgatgtgtgccctctactaacagagtcgaacctttctattcatagagcagttttgaaacactctttttgtagaatctgcaggagcatatttgcatatctttgaggatttcgttggaaacgggattgtcttcagataaaatccagacagaagcattctcagaaacttctttgggatgtttgcattgacgtcactgaggagaacatgccctttcgtacagaaggtttgaaacactctctttgcagtatctggaagtggacatttgaagcggtttcaggcctatgttgaaaaaggaaatatcttcccgtaacaactggacagaagcattctcagaagctagtctctgatgtgtgtcctcaactaacagagttgaacatttctttggagagtatagttttgaaacactctttttgtggagtctgcaagtggatatttggctggatttgaggatttcgttggaaacgggataaggtataaaaagcagacagcagcattctcagcaatttctttgtgatgtttgcattcaagtcacagaattgaacattccctttcacagagcaggtttgaaacactctttttgtagtgtctgtaactggacttttggagcgctttccggcctaaggtgaaaaaggacatatcttcccataaaaactacacagaagcattctcagaaacttgctcgtgatgtgtgtcctcaactgacggagtagaacctttcttttgatagagcagttttgaaacactctttttgtagaatctgcaagtggatatttggatacatttgaggatttcgttggaaacgggaagatcttcatataaaatcaagacagaagcattctcagaaacttccttgtgatggttgcattcaagtcacggagttgaacattggcattcatagagcaggttggaaacactctttttccattccctggaagtggacatttggagcgctttgaggcctatggtgaaaaaggaaatatcttcccataaaaactagacagaagcattctcagaaacttctttgtgatgtgtgtcctcaactgacagagttgaacatgtcttttgagaaagcagttttgaaacaatctttctgtggaacctgcaagtggatatttggctggctttgacgatttcgttggaaacgggaatacatataaaaagcagacagcagcgttctgagaaactacttggtgatgtttgcattcaagtcacagaatggaacgttccctttcacagaacaggtttgaaacactccttttgtcgtatctcgaagtgtccatttggagcgcattcaggcttgtgttggaaaaggaaatatcttcccataaaaatcagacagaagccttctcggcaacttgtttgtgatgtgtgccctctactaacagagtcgaacctttctattcatagagcagttttgaaacactccttttgtagaatctgaaggagcatatttgcatatctttgaggatttctttggaaacgggattgtcttcagataaaatccagacagaagcattctcagaaacttctttgggatgtttgcattgacgtcacagaggagaacatgccctttcgtagagaaggtttgaaacactctctttgcagtatctggaagtggacatttgaagtggtttcaggcctatgttgaaaaaggaaatatcttcccgtaacaactggacagaagcattctcagaagctagtctctgatgtgtgtcctcaactaacagagttgaacatttcttttgacagtacagttttgaaacactctttttgtggagtctgcaagtggatatttggctggatttgaggatttcgttggaaacgggataaggtataaaaagcagacagcagcattctcagcaacttctttgtgatgtttgcattcaagtcacagaattgaacattccctttcacagagcaggtttgaaacactctttttgtagtgtctgtaactggacttttggagcgctttccggcctaaggtgaaaaaggacatatcttcccataaaaactagacagaagcattgtcagaaacttactcgtgatgtgtgtccccaactgacggagtagaacctttcttttgatagagcagttttgaaacactctttttgtagaatctccaagtggatatttggatagctttgaggatttcgttggaaacgggaatatcttcatataaaacctagacagaagcattctcagaaacttccttgtgatggttgcattcaagtcacggagttgaacattcgctttcatagagcaggttggaaacactctttttccattccctggaagtggacatgtggagcgctttgaggcctatggtgaaaaaggaaatatcttcccataaaaactagacagaagcattctcagaaacttatttgtgatgtgtgtcctcaactgacagagttgaacatgtcttttgagagagcagttttgaaacactctttctgtggaacctgcaagtggatatttggctggctttgacgatttcgttggaaacgggaatacatattaaaagcagacagcagcgttctgagaaactacttggtgatgtttgcattcaagtcacagaatggaacgttccctttcacagaacaggtttgaaacactccttttgtcgtatctggaagtgtccatttggagcgcattcaggcctgtgttggaaaaggaaatatcttcccataaaaaccagacagaagccttctcggcaacttgtttgtgatgtgtgccctctactaacagagtcgaacctttctattcatagagcagttttgaaacactctttttgtagaatctgcaggagcatatttgcatagctttgaggatttcgttggaaacgggattgtcttcagataaaatccagacagaagcattctcagaaacttctttgggatgtttgcattgacgtcactgaggagaacatgccctttcgtagagaaggtttgaaacactctctttgcagtatctggaagtggacatttgaagcggtttcaggcctatgttgaaaaaggaaatatcttcccgtaacaactggacagaagcattctcagaagctagtctctgatgtgtgtcctcaactaacagagttgaacatttctttggagagtatagttttgaaacactctttttgtggagtctgcaagtggatatgtggctggatttgaggatttcgttggaaacgggataaggtataaaaagcagacagcagcattctcagcaatttctttgtgatgtttgcattcaagtcacagaattgaacattccctttcacagagcaggtttgaaacactctttttgtagtgtctgtaactggacttttggagcgctttccggcctaaggtgaaaaaggacatatcttcccataaaaactacacagactgggcgcagtggctcaatcctgtaatcccagcactttgggaggccgctgcgagcgctttcagccctgcagggctcaagcaacatgtaccccttctcgacgaacttggaagaagagctgcgattatactagctctacaaaagcgaatgcggcacactggctggtagggcgaatgcaaccatcacatggaaagtgacggagaatgcttannnnnnnnnnnnnnnnnnnnnnnnnnnnnnnnnnnnnnnnnnnnnnnnnnnnnnnnnnnnnnnnnnnnnnnnnnnnnnnnnnnnnnnnnnnnnnnnnnnnagaattctcagaaacttccttgtgatggttgcattcaaatcatggagttgaacattcgctttcatagagcaggttggaaacactctttttccattccctggaagtggacatttggagtgcttcgaggccaatggtgaaaaaggaaatatcttcccataaaaactagacagaagcattctcagaaacttcattgtgatgtgtgtcctcaactgacagagttgaacatgtcttttgagagagcagttttgaaacactctttctgtggaacctgcaagtggatatttagctggtttgacgatttcgttggaaacgggaatacatataaaaagcagacagcagcgttctgagaaatttcttggtgatgtttgcattcaagtcacagaattgaacattccctttgatagaacaggtttgaaacactccttttctcatatctggaagtgtccatttggagcgcattcaggcttgtgttgaaaaaggaaatatcttcccataaaaactagacagaagcattctcagcaactcgtttgtgatgtgtgcattctactaacagagctgaacctttcttttcatagagcagttttgaaacactctttttgtagaatctgcaggaggatatttgcatagctttgaggattgcgttggaaacgggattgtcttcacataaaatccagacagaagcattctcagaaacttctttgggatgtttgcattgacgtcacagaggagaacatgccctttcgtagagaaggtttgaaacactctctttgcagtatctggaagtggacatttgaagcggtttcaggcctatgttgaaaaaggaaatatcttcccgtaacaactggacagaagcattctcagaagctagtctctgatgtgtgtcctcaactaacagagttgaacatttctttggagagtatagttttgaaaaactctttttgtggagtgtgcaagtggatatttggctggatttgaggatttcgttggaaacgggataaggtacaaaaagcagacagcagcattctcagaaacttctttgtgatgtttgcatacaagtcacagaattgaacattccctttcacagagcaggtttgaaacactctttttgtagtgtctgtaagtggacttttggagtgctttccggccgaatgtgaaaaaggacatatcttcccataaaaattagacagaagcattctcagcaacttgtttgtgatgtgtgtcctcaaccaacagagtagaacctttcttttgatagagcagttttgaaacactctttttgtagaatctgcaagtggatatttggatagctttgaggatttcgttggaaacgggaatatcttcatataaaatctagatagaagcattctcagaaacttccttgtgatggttgcattcaagtcacggagttgaacattggcattcatagagcaggttggaaacactctttttccattccctggaagtggacatttggagcgctttgaggcctatggtgaaaaaggaaatatcttcccataaaaactagacagaagcattctcagaaacttctttgtgatgtgtgtcctcaactgacagagttgaacatgtcttttgagaaagcagttttgaaacaatctttctgtggaacctgcaagtggatatttggctggctttgacgatttcgttggaaacgggaatacatataaaaagcagacagcagcgttctgagaaactacttggtgatgtttgcattcaagtcacagaatggaacgttccctttcacagaacaggtttgaaacactccttttgtcgtatctcgaagtgtccgtttggtgcgcattcaggcttgtgttggaaaaggaaatatcttcccataaaaatcagacagaagccttctcggcaacttgtttgtgatgtgtgccctctactaacagagtcgaacctttctattcatagagcagttttgaaacactccttttgtagaatctgaaggagcatatttgcatatctttgaggatttctttggaaacgggattgtcttcagataaaatccagacagaagcattctcagaaacttctttgggatgtttgcattgacgtcacagaggagaacatgccctttcgtagagaaggtttgaaacactctctttgcagtatctggaagtggacatttgaagtggtttcaggcctatgttgaaaaaggaaatatcttcccgtaacaactggacagaagcattctcagaagctagtctctgatgtgtgtcctcaactaacagagttgaacatttcttttgacagtacagttttgaaacactctttttgtggagtctgcaagtggatatttggctggatttgaggatttcgttggaaacgggataaggtataaaaagcagacagcagcattctcagcaacttctttgtgatgtttgcattcaagtcacagaattgaacattccctttcacagagcaggtttgaaacactctttttgtagtgtctgtaactggacttttggagcgctttccggcctaaggtgaaaaaggacatatcttcccataaaaactagacagaagcattgtcagaaacttactcgtgatgtgtgtcctcaactgacggagtagaacctttcttttgatagagcagttttgaaacactctttttgtagaatctccaagtggatatttgggtagctttgaggatttcgttggaaacgggaatatcttcatataaaacctagacagaagcattctcagaaacttccttgtgatggttgcattcaagtcacggagttgaacattggctttcatacagtaggttggaaacactctttttccattccctggaagtggacatttggagcgctttgaggcctatggtgaaaaaggaaatatcttcccataaaaactagacagaagcattctcagaaacttctttgtgatgtgtgtcctcaactgacagagttgaacatgtcttttgagagagcagttttgaaacactctttctgtggaacctgcaagtggatatttggcgggctttgacgatttcgttggaaacgggaatacatataaaaacagacagcagcgttctgagaaactacttggtgatgtttgcattcaagtcacagaatggaacgttccctttcacagaacaggtttgaaacactccttttgtcgtatctcgaagtgtccatttggagcgcattcaggcttgtgttggaaaaggaaatatcttcccataaaaaccagacagaaacattctcggcaacttgtttgtgatgtgtgccctctactaacagagtcgaacctttcttttcatagagcagttttgaaacactctttttgtagaatctgcaggagcatatttgcatatctttgaggatttcgttggaaacgggattgtcctcagataaaatccagacagaagcattctcagaaacttctttgggatgtttgcattgacgtcactgaggagaacatgccctttcgtagagaaggtttgaaacactctctttgcagtatctggaagtggacatttgaagcggtttcaggcctatgttgaaaaaggaaatatcttcccgtaacaactggacagaagcattctcagaagctagtctctgatgtgtgtcctcaactaacagagttgaacatttctttggagagtatagttttgaaacactctttttgtggagtctgcaagtggatatttggctggatttgaggatttcgttggaaacgcgataaggtataaaaagcagacagcagcattctcagcaacttctttgtgatctttgcattcaagttacagaattgaacattccctttcacagagcaggtttgaaacactctttttgtagtgtctgtaactggacttttggagcgctttccggcctaaggtgaaaaaggacatatcttcccataaaaactagacagaagcattgtcagaaacttactcgtgatgtgtgtcctcaactgacggagtagaacctttcttttgatagagcagttttgaaacactctttttgtagaatctccaagtggatatttggatagctttgaggatttcgttggaaacgggaatatcttcatataaaacctagacagaagcattctcagaaacttccttgtgatggttgcattcaagtcacggagttgaacattggctttcatacagtaggttggaaacactctttttccattccctggaagtggacatttggagcgctttgaggcctatggtgaaaaaggaaatatcttcccataaaaactagacagaagcattctcagaaacttctttgtgatgtgtgtcctcaactgacagagttgaacatgtcttttgagagagcagttttgaaacactctttctgtggaacctgcaagtggatatttggcgggctttgacgatttcgttggaaacgggaatacatataaaaagcagacagcagcgttctgagaaactacttggtgatgtttgcattcaagtcacagaaaggaacgttccctttcatagaacaggtttgaaacacgccttttgtcgtatctggaagtggccatttggagcgcattcaggctagtgttggaaaaggaaatatcttcccataaaaaccagacagaagcattctcggcaacttgtttgtgatgtgtgccctctactaacagagtcgaacctttctattcatagagcagtttggaaacactctttttgtagaatctgcaggagcatatttgcatatctttgaggatttcgttggaaacgggattgtcttcagataaaatccagacagaagcattctcagaaacttctttgggatgtttgcattgacgtcacagaggagaacatgccctttcgtagagaaggtttgaaacactctctttgcagtatctggaagcggacatttgaagcggtatcaggcctattttgaaaaaggaaatatcttcccgtaacaactggacagaagcattctcagaagctagtctctgatgtgtgtcctcaactaacagagttgaacatttcttttgacagtagagttttgaaacactctttttgtggagtctgcaagtggatatttggctggatttgaggatttcgttggaaacgggataaggtataaaaagcagacagcagcgttctgagaaacatctttgtgatgtttgtattcaggacacagagttgaacattccctatcatagagcaggtttgaatcactccttttgtagtatctggaagtggacatttggagcgctttccggcctcaggtgaaaaaggaaatatcttcccataaaaactagacagaagcattgtcagaaacttactcgtgatgtgtgtcctcaactgacggaatagaacctttcttttgatagagcagttttgaaacactctttttgtagaatctccaagtggatatttggatagctttgaggatttcgttggaaacgggaatatcttcatataaaacctagacagaagcattctcagaaacttccttgtgatggttgcattcaagtcacggagttgaacattcgctttcatagagcaggttggaaacactctttttccattcggtggaagtggacatttggagcgcttcgaggcctatggtgaaaaaggaaatatcttcccatcaaaactagacagaagcattctcagaaacttctttgtgatgtgtgtcctcaactgacagagttgaacatgtcttttgagagagcagttttgaaacactctttctgtggaacctgcaagtggatatttggctggctttgacgatttcgttggaaacgggaatacatataaaaagcagacagcagcgttctgagaaactacttggtgatgtttgcattcaagtcacagaatggaacgttccctttcacagaacaggtttgaaacactccttttgtcgtatctggaagtgtccatttggagcgcattcaggcctgtgttggaaaaggaaatatcttcccataaaaaccagacagaagccttctcggcaacttgtttgtgatgtgtgccctctactaacagagtcgaacctttctattcatagagcagttttgaaacactctttttgtagaatctgcaggagcatatttgcatagctttgaggatttcgttggaaacgggattgtcttcagataaaatccagacagaagcattctcagaaacttctttgggatgtttgcattgacgtcacagaggagaacatgccctttcgtagagaaggtttgaaacactctctttgcagtatctggaagtggacacttgaagcggtttcaggcctatgttgaaaaaggaaatatcttcccgtaacaactggacagaagcattcccagaagctagtctctgatgtttgtcctcaactaacagagttgaacatttctttggagagtacagttttgcaacactctttttgtggagactgcaagtggatacttgactagatttgaggatttcgttggatatgggataaggtataaaaagcagacagcagcattctcagcaacttctttgtgatgtttgcattcaagtcacagaattgaacattccctttcacagagcaggtttgaaacactctttttgtagtgtctgtaactggacttttggagcgctttccggcctaaggtgaaaaaggacatatcttcccataaaaactagacagaagcattgtcagaaacttactcgtgatgtgtgtcctcaactgacggagtagaacctttcttttgatagagcagttttgaaacactctttttgtagaatctccaagtggatatttggatagctttgaggatttcgttggaaacgggaatatcttcatataaaacctagacagaagtattatcagaaacttccttgtgatggttgcattcaagtaacagagttgaacattcgctttcatagagcatgtttgaaacactctttttccattacctggaagtggacatttggagcgctttgaggcctatggtgaaaaaggaaatatcttcccaaaaaaactagacagaagcattctcagaaacttctttgtgatgtgtgtcctcaactgacagagttgaacatgtcttttgagagagcagttttgaaacactctttctgtggaacctgcaagtggatatttggctggctttgacgatttcgttggaaacgggaatacatataaaaagcagacagcagcgttctgagaaactacttggtgatgtttgcattcaagtcacagaatggaacgttccctttcacagaacaggtttgaaacactccttttgtcgtatctggaagtgtccatttggagcgcattcaggcttgtgttggaaaaggaaatatcttcccataaaaaccagacagaagcattctcggcaacttgtttgtgatgtgtgccctctactaacagagtcgaacctttcttttcatagagcagttttgaaacactctttttgtagaatctgcaggagcatatttgcatatctttgaggatttcgttggaaacgggattgtcttcagataaaatccagacagaagcattctcagaaacttctttgggatgtttgcattgacgtcactgaggagaacatgccccttcgtagagaaggtttgaaacactctctttgcagtatctggaagcggacatttgaagctgtttcaggcctatgttgaaaaaggaaatatcttcccgtaacaactggacagaagcattctcagaagctagtctctgatgtgtgtcctcaactaacagagttgaacatttctttggagagtatagttttgaaacactctttttgtggagtctgcaattggatatttggctggatttgaggatttcgttggaaacgcgataaggtataaaaagcagacagcagcattctcagcaacttctttgtgatgtttgcattcaagtcacagaattgaacattccctttcacatagcaggtttgaaacactctttttgtagtgtctgtaactggacttttggagcgctttccggcctaaggtgaaaaaggacatatcttcccataaaaactagacagaagcattgtcagaaacttactcgtgatgtgtgtcctcaactgacggagtagaacctttcttttgatagagcagttttgaaacactctttttgtagaatctccaagtggatatttggatagctttgaggatttcgttggaaacgggaatatcttcatataaaacctagacagaagcattctcagaaacttccttgtgatggttgcattcaagtcacggagatgaacattggctttcatagagcaggttggaaacactctttttccattccctggaagtggacatttggagcgctttgaggcctatggtgaaaaaggaaatatcttcccataaaaactagacagaagcattctcagaaacttctttgtgatgtgtgtcctcaactgacagagttgaacatgtcttttgagagagcagttctgaaacactctttctgtggaacctgcaagtggatatttggctggctttgacgatttcgttggaaatgggaatacatataaaaagcagacagcagcgttctgagaaactacttggtgatgtttgcattcaagtcacagaatggaacgttccctttcacagaacaggtttgaaacactccttttgtcgtatctggaagtgtccatttggagcgcattcaggcttgtgttggaaaaggaaatatcttcccataaaaaccagacagaagccttctcggcaacttgtttgtgatgtgtgccctctactaacagagtcgaacctttctattcatagagcagttttgaaacactctttttgtagaatctgcaggagcatatttgcatagctttgaggatttcgttggaaacgggattgtcttcagataaaatccagacagaagcattctcagaaacttctttgggatgtttgcattgacgtcactgaggagaacatgccctttcgtagagaaggtttgaaacactctctttgcagtatctggaagtggacatttgaagcggtttcaggcctatgttgaaaaaggaaatatcttcccgtaacaactggacagaagcattctcagaagctagtctctgatgtgtgtcctcaactaacagagttgaacatttctttggagagtatagttttgaaacactctttttgtggagtctgcaagtggatatttggctggatttgaggatttcgttggaaacgggataaggtataaaaagcagacagcagcattctcagcaatttctttgtgatgtttgcattcaagtcacagaattgaacattccctttcacagagcaggtttgaaacactctttttgtagtgtctgtaactggacttttggagcgctttccggcctaaggtgaaaaaggacatatcttcccataaaaactagacagaagcattctcagaaacttactcgtgatgtgtgtcctcaactaaagtggtagaacctttcttttgatagagcagttttgaaacactctttttgtagaatctgcaagtggatatttcgatagctttgtggatttcgttggaaacgggaatatcttcatataaaatctagagagaagtattatcagaaacttccttgtaatggttgtattcaagtcacagagttgaacattcgctttcatagagcatgtttgaaacactctttttccattacctggaactggacatttggagcgctttgaggcctatggtgaaaaaggaaatatcttcccaaaaaaactagacagaagcattctcagaaacttctttgtgatgtgtgtcctcaactgacagagttgaacatgtcttttgagagagcagttctgaaacactctttctgtggaacctgcaagtggatatttggctggctttgacgatttcgttggaaacgggaatacatataaaaagcagacagcagcgttctgagaaactacttggtgatgtttgcattcaagtcacagaatggaacgttccctttcacagaacaggtttgaaacactccttttgtcgtatgtggaagtgtccatttggagcgcattcaggcttgtgttggaaaaggaaatatcttcccataaaaaccagacagaagccttctcggcaacttgtttgtgatgtgtgccctctactaacagagtcgaacctttctattcatagagcagttttgaaacactctttttgtagaatctgcaggagcatatttgcatagctttgaggatttcgttggaaacgggattgtcttcagataaaatccagacagaagcattctcagaaacttctttgggatgtttgcattgacgtcactgaggagaacatgccctttcgtagagaaggtttgaaacactctctttgcagtatctggaagtggacatttgaagcggtttcaggcctatgttgaaaaaggaaatatcttcccgtaacaactggacagaagcattctcacaagctagtctctgatgtgtgtcctcaactaaaagatttgaacatttctttggagagtacagttttgaaacactctttttgtggagtctgcaagtggatatttggctagatttgaagattccgttggaaacgggataaggtataaaaagcagacagcagcattctcagcaacttctttgtgatgtttgcattcaagtcacagaattgaacattccctttcacagagcaggtttgaaacactctttttgtagtgtctgtaactggacttttggagcactttccggcctaaggtgaaaaaggacatatcttcccatgaaaactagacagataagcattctcagaaacttactcgtgatgtgtgtcctcaactaaaggggtagaacctttcttttgatagagcagttttgaaacactctttttgtagaatctgcaagtggatatttcgatagctttgtggatttcgttggaaacgggaatatcttcatataaaatctagagagaagcattctcagaaacttccttgtgatggttgcattcaagtcacggagttgaacattggctttcatagagcaggttggaaacactctttttccattccctggaagtggacatttggagcgctttgaggcctatggtgaaaaaggaaatatcttcccataaaaactagacagaagcattctcagaaacttctttgtgatgtgtgtcctcaactgacagagttgaacatgtcttttgagagagcagttttgaaacactctttctgtggaacctgcaagtggatatttggctggctttgacgatttcgttggaaacgggaatacatataaaaagcagacagcagcgtctgagaaactacttggtgatgtttgcattcaagtcacagaatggaacgttccctttcccagaaaaggtttgaaacactcctttagtcgtatctggaagtgtccatttggagcgcattcaggcttgtgttggaaaaggaaatatcttcccataaaaaccagacagaagcattctcggcaacttgtttgtgatgtgtgccctctactaacagagtcgaacctttctattcatagagcagttttgaaacactctttttgtagaatctgcaggagcatatttgtatatctttgaggatttggttggaaacgggattgtcttcagataaaatccagacagaagcattctcagaaagttctttgggatgtttgcattgacgtcacagaggagaacatgccctttcgtagagaaggtttgaaacactctctttgcagtatctggaagtggacacttgaagcggtttcaggcctatgttgaaaaaggaaatatcttcccgtaacaactggacagaagaattctcagaagctagtctctcatgtgtgtcctcaactaacagagttgaacatttcttttgacagtacagttttgaaacactctttttgtggagtctgcaagtggatatttggctggatttgaggatttcgttggaaacgggataaggtataaaaagcagacagcagcattctcagcaacttctttgtgatgtttgcattcaagtcacagaattgaacattccctttcacatagcaggtttgaaacactctttttgtagtgtctgtaactggacttttggagcgctttccggcctaaggtgaaaaaggacatatcttcccataaaaactagacagaagcattgtcagaaacttactcgtgatgtgtgtcctcaactgacggagtagaacctttcttttgatagagcagttttgaaacactctttttgtagaatctccaagtggatatttggatagctttgaggatttcgttggaaacgggaatatcttcatataaaacctagacagaagcattctcagaaacttccttgtgatggttgcattcaagtcacggagttgaacattggctttcatagagcaggttggaaacactctttttccattccctggaagtggacatttggagcgctttgaggcctatggtgaaaaaggaaatatcttcccataaaaactagacagaaagcattctcagaaacttctttgtgatgtgtgtcctcaactgacagagttgaacatgtcttttgagagagcagttttgaaacactctttctgtggaacctgcaagtggatatttggctggctttgacgatttcgttggaaacgggaatacatataaaaagcagacagctgcgttctgagaaactacttggtgatgtttgcattcaagtcacagaatggaacgttccctttcacagaacaggtttgaaacactccttttgtcgtatctggaagtgtccatttggagcgcattcaggcttgtgttggaaaaggaaatatcttcccaaaaaaatcagacaaaagcattctcggcaacttgtttgtgatgtgtgccctctactaacagagtcgaacttttcttttcatagagcagttttgaaacactctttttgtagaatctgcaggagcatatttgcatatctttgaggatttcgttggaaacgggattgtcttcagataaaatccagacagaagcattctcagaaacttctttgggatgtttgcattgacgtcacagaggagaacatgccctttcgtagagaaggtttgaaacactctctttgcagtatctggaagtggacatttgaagcggtttcaggcctatgttgaaaaaggaaatatcttcccgtaacaactggacagaagcattctcagaagctagtctctgatgtgtgtcctcaactaacagagttgaacatttctttggagagtatagttttgaaaaactctttttgtggagtgtgcaagtggatatttggctggatttgaggatttcgttggaaacgggataaggtataaaaagcagacagcagcattctcagcaatttctttgtgatgtttgcattcaagtcacagaattgaacattccctttcacagagcaggtttgaaacactctttttgtagtgtctgtaactggacttttggagcgctttccggcctaaggtgaaaaaggacatatcttcccataaaaactagacagaagcattgtcagaaacttactcgtgatgtgtgtcctcaactgacggagtagaacctttcttttgatagagcagttttgaaacactctttttgtagaatctccaagtggatatttggatagctttgaggatttcgttggaaacgggaatatcttcatataaaacctagacagaagcattctcagaaactttccttgtgatggttgcattcaagtcacggagttgaacattggcattcatagagcaggttggaaacactctttttccattccctggaagtggacatttggagcgctttgaggcctatggtgaaaaaggaaatatcttcccataaaaactagacagaagcattctcagaaacttctttgtgatgtgtgtcctcaactgacagagttgaacatgtcttttgagagagcagttctgaaacactctttctgtggaacctgcaagtggatatttggctggctttgacgatttcgttggaaacgggaatacatataaaaagcagacagcagcgttctgagaaactacttggtgatgtttgcattcaagtcacagaatggaacgttccctttcacagaacaggtttgaaacactccttttgtcgtatctggaagtgtccatttggagcgcattcaggcttgtgttggaaaaggaaatatcttcccataaaaaccagacagaagccttctcggcaacttgtttgtgatgtgtgccctctactaacagagtcgaacctttctattcatagagcagttttgaaacactctttttgtagaatctgcaggagcatatttgcatagctttgaggatttcgttggaaacgggattgtcttcagataaaatccagacagaagcattctcagaaacttctttgggatgtttgcattgacgtcactgaggagaacatgccctttcgtagagaaggtttgaaacactctctttgcagtatctggaagtggacatttgaagcggtttcaggcctatgttgaaaaaggaaatatcttcccgtaacaactggacagaagcattctcagaagctagtctctgatgtgtgtcctcaactaacagagttgaacatttctttggagagtatagttttgaaacactctttttgtggagtctgcaagtggatatttggctggatttgaggatttcgttggaaacgggataaggtataaaaagcagacagcagcattctcagcaatttctttgtgatgtttgcattcaagtcacagaattgaacattccctttcacagagcaggtttgaaacactctttttgtagtgtctgtaactggacttttggagcgctttccggcctaaggtgaaaaaggacatatcttcccataaaaactacacagaagcattgtcagaaacttactcgtgatgtgtgtcctcaactgacggagtagaacctttcttttgatagagcagttttgaaacactctttttgtagaatctccaagtggatatttggatagctttgaggatttcgttggaaacgggaatatcttcatataaaacctagacagaagcattctcagaaacttccttgtgatggttgcattcaagtcacggagttgaacattggctttcatagagcaggttggaaacactctttttccattccctggaagtggacatttggagcgcattgaggcctatggtgaaaaaggaaatatcttcccataaaaactagacagaagcattctcagaaacttctttgtgatgtgtgtcctcaactgacagagttgaacatgtcttttcagagagcagttctgaaacactctttctgtggaacctgcaagtggatatttggctggctttgacgatttcgtaggaaacgggaatacatataaaaagcagacagcagcgttctgagaaactacttggtgatgtttgcattcaagtcacagaatggaacgttccctttcacagaacaggtttgaaacactccttttgtcgtatctggaagtgtccatttggagcgcattcaggcctgtgttggaaaaggaaatatcttcccataaaaaccagacagaagccttctcggcaacttgtttgtgatgtgtgccctctactaacagagtcgaacctttctattcatagagcagttttgaaacactctttttgtagaatctgcaggagcatatttgcatagctttgaggatttcgttggaaacgggattgtcttcagataaaatccagacagaagcattctcagaaacttctttgggatgtttgcattgacgtcactgaggagaacatgccctttcgtagagaaggtttgaaacactctctttgcagtatctggaagtggacatttgaagcggtttcaggcctatgttgaaaaaggaaatatcttcccgtaacaactggacagaagcattctcagaagctagtctctgatgtgtgtcctcaactaacagagttgaacatttctttggagagtatagttttgaaacactctttttgtggagtctgcaagtggatatttggctggatttgaggatttcgttggaaacgggataaggtataaaaagcagacagcagcattctcagcaatttctttgtgatgtttgcattcaagtcacagaattgaacattccctttcacagagcaggtttgaaacactctttttgtagtgtctgtaactggacttttggagcgctctccggcctaaggtgaaaaaggacatatcttcccataaaaactagacagaagcattgtcagaaacttactcgtgatgtgtgtcctcaactgacggagtagaacctttcttttgatagagcagttttgaaacactctttttgtagaatctccaagtggatatttggatagctttgaggatttcgttggaaacgggaatatcttcatataaaacctagacagaagcattctcagaaacttccttgtgatggttgcattcaagtcactgagttgaacattcgctttcatagagcaggttggaaacactctttttccattccgtggaagtggacattgggagcgcttcgaggcctatggtgaaaaaggaaatatcttcccatcaaaactagacagaagcattctcagaaacttatttgtgatgtgtgtcctcaactgacagagttgaacatttcttttgagagagcagttttgaaacactctttttgtggaatctgcaagtggatatttggctggcgttgacgacttcgttggaaacgggaatacatataaaaagcagacagcagcgttctgagaaacttcttggtgatgtttacattcaagtcacagaatggaacgttccctttcatagaacaggtttgaaactctccttttgtcgtatctggaagtgtccatttggagcgcattcaggcttgtgttgaaaaaggaaatatcttcccataaaaactagacagaagcattctcggcaacttgtttgtgatgtgtgccctctactaacagagtcgaacctttcttttcatagagcagttttgaaacactctttttgtagaatctgcaggagcatatttgcatatgctttgaggatttcgttggaaacgggattgtcttcagataaaatccagacagaagcattctcagaaacttctttgggatgtttgcattcaagtcacagaggagaacatgccctttcgtagagaaggtttgaaacactgtttttgtagtatctggaagtggacttttggagcggtttcaggcctatgttgaaaaaagaaatatcttcccgtaacaactggacagaagcatactcagaagctagtctctcatgagtgtcctcaactaacagagttgaacatttctttagacagaagagttttgaaatactctttttggggagtctgaaagtggatatttggctagatttgaggatttcgttggaaacgggattacgaataaaaagccgacagcagcattctcagcaacttctttgtgatgtttgcattcaagtcacagaattgaacattccctttcacagagcaggtttgaaacactctttttgtagtgtctgtaactggacatttggggcgctttccggcctaaggtgaaaaaggacatatcttcccataaaaactagacagaagcattctcagaaacttactcgtgatgtgtgtcctcaactaaaggggtagaacctttcttttgatagagcagttttgaaacactctttttgtagaatctgcaactggatatttcgatagctttgtggatttccttggaaacgggaatatcttcgtataaaatctagagagaagcattctcagaaacttccttgtgatggttgcattcaagtcacggagttgaacattggcattcatagagcaggttggaaacactctttttccattccctggaagtggacatttggagcgctttgaggcctatggtgaaaaaggaaatatcttcccataaaaactagacagaagcattctcagaaacttctttgtgatgtgtgtcctcaactgacagagttgaacatgtcttttgagaaagcagttttgaaacaatctttctgtggaacctgcaagtggatatttggctggctttgacgatttcgttggaaacgggaatacatataaaaagcagacagcagcgttctgagaaactacttggtgatgtttgcattcaagtcacagaatggaacgttccctttcacagaacaggtttgaaacactccttttgtcgtatctggaagtgtccatttggagcgcattcaggcttgtgttggaaaaggaaatatcttcccataaaaaccagacagaagccttctcggcaacttgtttgtgatgtgtgccctctactaacagagtcgaacctttctattcatagagcagttttgaaacactccttttgtagaatctgaaggagcatatttgcatatctttgaggatttctttggaaacgggattgtcttcagataaaatccagacagaagcattctcagaaacttctttgggatgtttgcattgacgtcacagaggagaacatgccctttcgtagagaaggtttgaaacactctctttgtagtatctggaagtggacatttgaagtggtttcaggcctatgttgaaaaaggaaatatcttcccgtaacaactggacagaagcattctcagaagctagtctctgatgtgtgtcctcaactaacagagttgaacatttcttttgacagtacagttttgaaacactctttttgtggagtctgcaagtggatatttggctggatttgaggatttcgttggaaacgggataaggtataaaaagcagacagcagcattctcagcaacttctttgtgatgtttgcattcaagtcacagaattgaacattccctttcacagagcaggtttgaaacactctttttgtagtgtctgtaactggacttttggagcgctttccggcctaaggtgaaaaaggacatatcttcccataaaaactagacagaagcattgtcagaaacttactcgtgatgtgtgtcctcaactgacggagtagaacctttcttttgatagagcagttttgaaacactctttttgtagaatctccaagtggatatttgggtagctttgaggatttcgttggaaacgggaatatcttcatataaaacctagacagaagcattctcagaaacttccttgtgatggttgcattcaagtcacggagttgaacattggctttcatagagcaggttggaaacactctttttccattccctggaagtggacatttggagcgctttgaggcctatggtgaaaaaggaaatatcttcccataaaaactagacagaagcattctcagaaacttcattgtgatgtgtgtcctcaactgacagagttgaacatgtcttttgagagagcagttttgaaacactctttctgtggaacctgcaagtggatatttagctggtttgacgatttcgttggaaacgggaatacatataaaaagcagacagctgcgttctgagaaactacttggtgatgtttgcattcaagtcacagaatggaacgttccctttcacagaacaggtttgaaacactccttttgtcgtatctggaagtgtccatttggagcgcattcaggcttgtgttggaaaaggaaatatcttcccaaaaaaatcagacagaagcattctcggcaacttgtttgtgatgtgtgccctctactaacagagtcgaacttttcttttcatagagcagttttgaaacactctttttgtagaatctgcaggagcatatttgcatatctttgaggatttcgttggaaacgggattgtcttcagataaaatccagacagaagcattctcagaaacttctttgggatgtttgcattgacgtcacagaggagaacatgccctttcatagagaaggtttgaaacactctctttgcagtatctggaagtggacatttgaagcggtttcaggcctatgttgaaaaaggaaatatcttcccgtaacaactggacagaagcattctcagaagctagtctctgatgtgtgtcctcaactaacagagttgaacatttctttggagagtatagttttgaaaaactctttttgtggagtgtgcaagtggatatttggctggatttgaggatttcgttggaaacgggataaggtataaaaagcagacagcagcattctcagcaatttctttgtgatgtttgcattcaagtcacagaattgaacattccctttcacagagcaggtttgaaacactctttttgtagtgtctgtaactggacttttggagcgctttccggcctaaggtgaaaaaggacatatcttcccataaaaactagacagaagcattgtcagaaacttattcgtgatgtgtgtcctcaactgacggagtagaacctttcttttgatagaacagttttgaaacactctttttgtagaatctccaagtggatatttggatagctttgaggatttcgttggaaacgggaatatcttcatataaaatctagacagaagcattctcagaaacttccttgtgatgtttgcattcaagtcacggagttgaacattcgctttcatagagtaggttggaaacactctttttccatcccctggaagtggacatttggagcgctttgaggcctatggtgaaaaaggaaatatcttcccataaaaactagacagaagcattctcagaaacttatttgtgatgtgtgtcctcaactgacagagttgaacatgtcttttgagagagcagttttgaaacactctttctgtggaacctgcaagtggatatttggctggctttgacgatttcgttggaaacgggaatacatattaaaagcagtcagcagtgttctgagaaactacttggtgatgtttgcattcaagtcacagaaaggaacgttccctttcatagaacaggtttgaaacacgccttttgtcgtatctggaagtggcaatttggagcgcattcaggctagtgttggaaaaggaaatatcttcccataaaaaccagacagaagcattctcggcaacttgtttgtgatgtgtgccctctactaacagggtcgtacctttcttttcatagagcagttttgaaacactctttttgtagaatctgcaggagcatatttgcatagtttgaggatttcgttggaaacgggattgtcttcagataaaatccagacagaagcattctcagaaacttctttgggatgtttgcattgacgtcacagaggagaacatgccctttcgtcgagaaggtttgaaacactctctttgcagtatctagaagtggacatttgaagcggtttcaggcctatgttgaaaaaggaaacatcttcccgtaacaactggacagaagcattctcagaagctagtctctgatgtgtgtcctcaactaacagagttaaatatttctttggacagtacagttttgaaacactctttttgtggagagtgcaagtggatacttggctagatttgaggatttcgttggaaacgggataaggtatgaaaagcagacagcagcattctcagcaacttctttgtgatgtttgcattcaagtcacagaattgaacattctctttcacagagcaggtttgaaacactctttttgtagtgtctgtaagtggatttttggggcgctttccggcctaaggtgaaaaaggacatatattcccataaaaactagacagaagcattgtcagaaacttactcgtgatgtgtgtcctcaactgacggagtagaacctttcttttgatagagcagttttgaaacactctttttgtagaatctccaagtggatatttggatagctttgaggatttcgttggaaacgggaatatcttcatataaaacctagacagaagcattctcagaaacttccttgtgatggttgcattcaagtcacggagttgaacattggctttcatagagcaggttggaaacactctttttccattccctggaagtggacatttggagcgcattgaggcctatggtgaaaaaggaaatatcttcccataaaaactagacagacgcattctcagaaacttactcgtgatgtgtgtcctcaactgacagagttgaacatttcttttgagagagcagttttgaaacactctttttgtggaatctgaaggggatatttggctggatttgacgatttcgttggaaacggtaatacatataaaaagcagacagcagcgttctgagaaacttcttggtgatgtttgcattcaagtcacagaatggaacgttccctttcatacaacaggtttgaaacactccttttgtcgtatctggaagtgtccatttggagcgcattctggcttgtgttgaaaaaggaaatatcttcccataaaaactagacagaagcattctcggcaacttgtttgtgatgtgtgccctctactaacagagtcgaacttttcttttcatagagcagttttgaaacactctttttgtagaatctgcaggagcatatttgcatatctttgaggatttcgttggaaacgggattgtcttcagataaaatccagacagaagcattctcagaaacttctttgggatgtttgcattgacgtcactgaggagaacatgccctttcgtagagaaggtttgaaacactctctttgcagtatctggaagtggacatttgaagcggtttcaggcctatgttgaaaaaggaaatatcttcccgtaacaactggacagaagcattctcagaagctagtctctgatgtgtgtcctcaactaacagagttgaacatttctttggagagtatagttttgaaaaactctttttgtggagtgtgcaagtggatatttggctggatttgaggatttcgttggaaacgggataaggtataaaaagcagacagcagcattctcagcaatttctttgtgatgtttgcattcaagtcacagaattgaacattccctttcacagagcaggtttgaaacactctttttgtagtgtctgtaactggacttttggagcgctttccggcctaaggtgaaaaaggacatatcttcccataaaaactagacagaagcattgtcagaaacttactcgtgatgtgtgtcctcaactgacggagtagaacctttcttttgatagagcagttttgaaacactctttttgtagaatctccaagtggatatttggatagctttgaggatttcgttggaaacgggaatatcttcatataaaacctagacagaagcattctcagaaacttccttgtgatggttgcattcatgtcacggagttgaacattggctttcatagagcaggttggaaacactctttttccattccctggaagtggacatttggagcgctttgaggcctatggtgaaaaaggaaacatcttcccataaaaactagacattagcattctcagaaacttctttgtgatgtgtgtcctcaactgacagagttgaacatgtcttttgagagagcagttctgaaacactctttctgtggaacctgcaagtggatatttggctggctttgacgatttcgttggaaacgggaatacatataaaaagcagacagcagcgttctgagaaactacttggtgatgtttgcattcaagtcacagaatggaacgttccctttcacagaacaggtttgaaacactccttttgtcgtatctggaagtgtccatttggagcgcattcaggcttgtgttggaaaaggaaatatcttcccataaaaaccagacagaagccttctcggcaacttgtttgtgatgtgtgccctctactaacagagtcgaacctttctattcatagagcagttttgaaacactctttctgtagaatctgcaggagcatatttgcatatctttgaggatttcgttggaaacgggattgtcttcagataaaatccagacagaagcattctcagaaacttctttgggatgtttgcattgacgtcactgaggagaacatgccctttcgtagagaaggtttgaaacactctctttgcagtatctggaagtggacatttgaagcggtttcaggcctatgttgaaaaaggaaatatcttcccgtaacaactggacagaagcattctcagaagctagtctctgatgtgtgtcctcaactaacagagttgaacatttctttggagagtatagttttgaaacactctttttgtggagtctgcaagtggatatttggctggatttgaggatttcgttggaaacgggataaggtataaaaagcagacagcagcattctcagcaatttctttgtgatgtttgcattcaagtcacagaattgaacattccctttcacagagcaggtttgaaacactctttttgtagtgtctgtaactggacttttggagcgctttccggcctaaggtgaaaaaggacatatcttcccataaaaactagacagaagcattgtcagaaacttactcgtgatgtgtgtcctcaactgacggagtagaacctttcttttgatagagcagttttgaaacactctttttgttgaatctccaagtggatatttggatagctttgaggatttcgttggaaacgggaatatcttcatataaaacctagacagaagcattctcagaaacttccttgtgatggttgcgttcaagtcacggagttgcacattggctttcatagagcaggttggaaacactctttttccattccctggaagtggacatttggagcgctttgaggcctatggtgaaaaaggaaatatcttcccataaaaactagacagaagcattctcagaaacttctttgtgatgtgtgtcctcaactgacagagttgaacatgtcttttgagagagcagttctgaaacactctttctgtggaacctgcaagtggatatttggctggctttgacgatttcgttggaaacgggaatacatataaaaagcagacagcagcgttctgagaaactacttggtgatgtttgcattcaagtcacagaatggaacgttccctttcacagaacaggtttgaaacactccttttgtcgtatctggaagtgtccatttggagcgcattcaggcctgtgttggaaaaggaaatatcttcccataaaaaccagacagaagccttctcggcaacttgtttgtgatgtgtgccctctactaacagagtctaacctttctattcatagagcagttttgaaacactctttttgtagaatctgcaggagcatatttgcatagctttgaggatttcgttggaaacgggattgtcttcagataaaatccagacagaagcattctcagaaacttctttgggatgtttgcattgacgtcacagaggagaacatgccctttcgtagagaaggtttgaaacactctctttgcagtatctggaagtggacatttgaagcggtttcaggcttatgttggaaaaggaaatatcttcccttaacaactggacagaagcattctcagaagctagtctctgatgtgtgtcctcaactaacagagttgaacatttctttggagagtatagttttgaaacactctttttgtggagtctgcaagtggatatttggctggatttgaggatttcgttggaaacgcgataaggtataaaaagcagacagcagcattctcagcaatttctttgtgatgtttgcattcaagtcacagaattgaacattccctttcacagagcaggtttgaaacaatctttttgtagtgtctgtaactggacttttggagcgctttccggcctaaggtgaaaaaggacatatcttcccataaaaactagacagaagcattgtcagaaacttactcgtgatgtgtgtcctcaactgacggagtagaacctttcttttgatagagcagttttgaaacactctttttgtagaatctccaagtggatatttggatagctttgaggatttcgttggaaacgggaatatcttcatataaaacctagacagaagcattctcagaaacttccttgtgatggttgcattcaagtcacggagttgaacattggctttcatagagcaggttggaaacactctttttccattccctggaagtggacatttggagcgctttgaggcctatggtgaaaaaggaaatatcttcccataaaaactagacagaagcattctcagaaacatctttgtgatgtgtgtcctcaactgacagagttgaacatgtcttttgagagagcagtttgaaacactctttttgtggaacctgcaagtggatatttggctggctttgacgatttcgttggaaacgggaatacatataaaaagcagacagcagcgttctgagaaactacttggtgatgtttgcattcaagtcacagaatggaacgttccctttcacagaacaggtttgaaacactccttttgtcgtatctggaagtgtccatttggagcgcattcaggcttgtgttggaaaaggaaatatcttcccataaaaaccagacagaagcattctcggcaacttgtttgtgatgtgtgccctctactaacagagtcgaacctttctattcatagagcagttttgaaacactctttttgtagaatctgcaggagcatatttgcatatctttgaggatttcgttggaaacgggattgtcttcagataaaatccagacagaagcattctcagaaacttctttgggatgtttgcattgacgtcactgaggagaacatgccctttcgtagagaaggtttgaaaccctctctttgcagtatctggaagtggatatttgaagcggtttcaggcctatgttgaaaaggaaacatattcccgtaacaactggacagaagcattctcagaagctagtctctgatgtgtgtcctcaactaacagagttgaacatttctttggagagtatagttttgaaacactctttttgtggagtctgcaagtggatatttggctggatttgaggatttcgttggaaacgcgataaggtataaaaagcagacagcagcattctcagcaatttctctgtgatgtttgcattcaagtcacagaattgaacattccctttcacagagcaggtttgaaacactctttttgtagtgtctgtaactggacttttggagcgctttccggcctaaggtgaaaaaggacatatcttcccataaaaactagacagaagcattgtcagaaacttactcgtgatgtgtgtcctcaactgacggagtagaacctttcttttgatagagcagttttgaaacactctttttgtagaatctccaagtggatatttggatagctttgaggatttcgttggaaacgggaatatcttcatataaaacctagacagaagcattctcagaaacttccttgtgatggttgcattcaagtcacggagttgaacattggctttcatagagcaggttggaaacactctttttccattccctggaagtggacatttggagcgctttgaggcctatggtgaaaaaggaaatatcttcccataaaaactagacagaagcattctcagaaacttctttgtgatgtgtgtcctcaactgacagagttgaacatgtcttttgagagagcagttttgaaacactctttctgtggaacctgcaagtggatatttggctggctttgacgatttcgttggaaacgggaatacatataaaaagcagacagcagcgttctgagaaactacttggtgatgtttgcattcaagtcacagaatggaacgttccctttcacagaacaggtttgaaacactccttttgtcgtatctggaagtgtccatttggagcgcattcaggcttgtgttggaaaaggaaatatcttcccataaaaaccagacagaagccttctcggcaacttgtttgtgatgtgtgccctctactaacagagtcgaacctttctattcatagagcagttttgaaacactctttttgtagaatctgcaggagcatatttgcatagctttgaggatttcgttggaaacgggattgtcttcagataaaatccagacagaagcattctcagaaacttctttgggatgtttgcattgacgtcactgaggagaacatgccctttcgtagagaaggtttgaaacactctctttgcagtatctggaagtggacatttgaagcggtttcaggcctatgttgaaaaaggaaatatcttcccgtaacaactggacagaagcattctcagaagctagtctctgatgtgtgtcctcaactaacagagttgaacatttctttggagagtatagttttgaaacactctttttgtggagtctgcaagtggatatttggctggatttgaggatttcgttggaaacgggataaggtataaaaagcagacagcagcattctcagcaatttctttgtgatgtttgcattcaagtcacagaattgaacattccctttcacaaagcaggtttgaaacactctttttgtagtgtctgtaactggacttttggagcgctttccggcctaaggtgaaaaaggacatatcttcccataaaaactagacagaagcattgtcagaaacttactcgtgatgtgtgtcctcaactgacggagtagaacctttcttttgatagagcagttttgaaacactctttttgtagaatctccaagtggatatttgggtacctttgaggatttcgttggaaacgggaatatcttcatataaaacctagacagaagcattctcagaaacttccttgtgatggttgcattcaagtcacggagttgaacattggctttcatacagtaggttggaaacactctttttccattccctggaagtggacatttggagcgctttgaggcctatggtgaaaaaggaaatatcttcccataaaaactagacagaagcattctcagaaacttctttgtgatgtgagtcctcaactgacagagttgaacatgtcttttgagagagcagttttgaaacactctttctgtggaacctgcaagtggatatttggcgggctttgacgatttcgttggaaacgggaatacatataaaaacagacagcagcgttctgagaaactacttggtgatgtttgcattcaagtcacagaatggaaggttccctttcacagaacaggtttgaaacactccttttgtcgtatctcgaagtgtccatttggagcgcattcaggcttgtgttggaaaaggaaatatcttcccataaaaaccagacagaaacattctcggcaacttgtttgtgatgtgtgccctctactaacagagtcgaacctttcttttcatagagcagttttgaaacactctttttgtagaatctgcaggagcatatttgcatatctttgaggatttcgttggaaacgggattgtcctcagataaaatccagacagaagcattctcagaaacttctttgggatgtttgcattgacgtcactgaggagaacatgccctttcgtagagaaggtttgaaacactctctttgcagtatctggaagtggacatttgaagcggtttcaggcctatgttgaaaaaggaaatatcttcccgtaacaactggacagaagcattctcagaagctagtctctgatgtgtgtcctcaactaacagagttgaacatttctttggagagtatagttttgaaacactctttttgtggagtctgcaagtggatatttggctggatttgaggatttcgttggaaacgggataaggtataaaaagcagacagcagcattctcagcaatttctctgtgatgtttgcattcaagtcacagaattgaacattccctttcacagagcaggtttgaaacactctttttgtagtgtctgtaactggacttttggagcgctttccggcctaaggtgaaaaaggacatatcttcccataaaaactacacagaagcattgtcagaaacttactcgtgatgtgtgtcctcaactgacggagtagaacctttcttttgatagagcagttttgaaacactctttttgtagaatctccaagtggatatttggatagctttgaggatttcgttggaaacgggaatatcttcatataaaacctagacagaagcattctcagaaacttccttgtgatggttgcattcaagtcacggagttgaacattggctttcatagagcaggttggaaacactctttttccattccctggaagtggacatttggtgcgctttgaggcctatggtgaaaaaggaaatatcttcccataaaaactagacagaagcattctcagaaacttctttgtgatgtgtgtcctcaactgacagagttgaacatgtcttttgagagagcagttctgaaacactctttctgtggaacctgcaagtggatatttggctggctttgacgatttcgttggaaacgggaatacatataaaaagcagacagcagcgttctgagaaactacttggtgatgtttgcattcaagtcacagaatggaacgttccctttcacagaacaggtttgaaacactccttttgtcgtatctggaagtgtccatttggagcgcattcaggcttgtgttggaaaaggaaatatcttcccataaaaaccagacagaagcattctcggcaacttgtttgtgatgtgtgccctctactaacagagtcgaacctttctattcatagagcagttttgaaacactctttttgtagaatctgcaggagcatatttgcatatctttgaggatttcgttggaaacgggattgtcttcagataaaatccagacagaagcattctcagaaacttctttgggatgtttgcattgacgtcactgaggagaacatgccctttcgtagagaaggtttgaaaccctctctttgcagtatctggaagtggatatttgaagcggtttcaggcctatgttgaaaaggaaacatattcccgtaacaactggacagaagaattctcagaagctagtctctcatgtgtgtcctcaactaacagagttgaacatttcttttgacagtacagttttgaaacactctttttgtggagtctgcaagtggatatttggctggatttgaggatttcgttggaaacgggataaggtataaaaagcagacagcagcattctcagcaacttctttgtgatgtttgcattcaagtcacagaattgaacattccctttcacatagcaggtttgaaacactctttttgtagtgtctgtaactggacttttggagcgctttccggcctaaggtgaaaaaggacatatcttcccataaaaactagacagaagcattgtcagaaacttactcgtgatgtgtgtcctcaactgacggagtagaacctttcttttgatagagcagttttgaaacactctttttgtagaatctccaagtggatatttggatagctttgaggatttcgttggaaacgggaatatcttcatataaaacctagacagaagcattctcagaaacttccttgtgatggttgcattcaagtcacggagttgaacattggctttcatagagcaggttggaaacactctttttccattccctggaagtggacatttggagcgctttgaggcctatggtgaaaaaggaaatatcttcccataaaaactagacagaagcattctcagaaacttctttgtgatgtgtgccctcaactgacagagttgaacatgtcttttgagagagcagttctgaaacactctttctgtggaacctgcaagtggatatttggctggctttgacgatttcgttggaaacgggaatacatataaaaagcagacagcagcgttctgagaaactacttggtgatgtttgcattcaagtcacagaatggaacgttccctttcacagaacaggtttgaaacactccttttgtcgtatctggaagtgtccatttggagcgcattcaggcttgtgttggaaaaggaaatatcttcccataaaaaccagacagaagcattctcggcaacttgtttgtgatgtgtgccctctactaacagagtcgaacctttcttttcatagagcagttttgaaacactctttttgtagaatctgcaggagcatatttgcatatctttgaggatttcgttggaaacgggattgtcttcagataaaatccagacagaagcattctcagaaacttctttgggatgtttgcattgacgtcactgaggagaacatgccctttcgtagagaaggtttgaaacactctctttgcagtatctggaagtggacatttgaagcggtttcaggcctatgttgaaaaaggaaatatcttcccgtaacaactggacagaagcattctcagaagctagtctctgatgtgtgtcctcaactaacagagttgaacatttctttggagagtatagttttgaaacactctttttgtggagtctgcaagtggatatttggctggatttgaggatttcgttggaaacgggataaggtacaaaaagcagacagcagcattctcagcaacttctttgtgatctttgcattcaagttacagaattgaacattccctttcacagagcaggtttgaaacactctttttgtagtgtctgtaactggacttttggagcgctttccggcctaaggtgaaaaaggacatatcttcccataaaaactagacagaagcattgtcagaaacttactcgtgatgtgtgtcctcaactgacggagtagaacgtttcttttgatagagcagttttgaaacactctttttgtagaatctccaagtggatatttggatagctttgaggatttcgttggaaacgggaatatcttcatataaaacctagacagaagcattctcagaaacttccttgtgatggttgcattcaagtcacggagttgaacattggcattcatagagcaggttggaaacactctttttccattccctggaagtggacatttggagcgctttgaggcctatggtgaaaaaggaaatatcttcccataaaaactagacagaagcattctcagaaacttttttgtgatgtgtatcctcaactgacagagttgaacatttcttttgagggagcagaattgaaacactctttttgtggaatctgcaagtggatatttggctggctttgacgatttcgttggaaacggaaatacatataaaaagcagacagcagcgttctgagaaacttcttggtgatgtttgcattcaagtcacggaatggaacgttccctttcatagaacaggtttgaaacactccttttgtcgtatctggaagtgtccatttggagcgcattaaggcttgtgttgaaaaaggaaatatcttcctataaaatacagacaaaagcattctcagcaacttgtttgtgatgtgtgccctctactaacagagttgaacctttcttttcatagagcagttttgaaacactctttttgtagaatctgcaggaggatatttgcatagtttgaggatttcgttggaaacgggattgtcttcagataaaatccagacagaagcattctcagaaccttctttgggatgtttccattcaagtcacagaggagaacatgccctttcgtagagaaggtttgaaacactctttttgtagtatctggaagtggacatttggagcggtttcaggcctatgttgaaaaaggaaatatcttcccgtaacaactggacagaagcattatcagaagctagtctctcatgtgtgtcctcaactaacagagttgaacatttctttagacagaacagttttgaaacactctttttgtggagtctgcaagtggatatttggctagatttttaggatttcgttggaaaccggattacgtataaaaagccgacagcagcattctcagaaacttctttgtgatgcttgcattcaagtcacagaattgaacattccctttcacagagcaggtttgaaacactctttttgtagtgtctgtaagtggacctttggagcgctttccggcctaaggtgaaaaaggacatatcttcccataaaaactagacagaagcattctcagaaacttactcgtgatgtgtgtcctcaactaaaggggtagaacctttcttttgatagagcagttttgaaacactctttttgtagaatctgcaagtggatatttcgatagctttgtggatttcgttggaaacgggaatatcttcatataaaatctagagagaagaattctcagaaacttccttgtgatggttgcattcaagtcacggggttgaacattcactttcatagagcaggttggaaacactctttttccattccctggaagtggacatttggagcgcttcgaggcctatggtgaaaaaggaaatatcttcccatcaaaactagacagaagcattctcagaaacttatttgtgatgtgtgtcctcaactgacagagttgaacatttcttttgagagagcagttttgaaacactctttttgtggaatctgcaagtggatatttggctggctttgacgactttgttggacacgggaatacatataaaaagcagacagcagcgttctgagaaacttcttggtgatgtttgcattcaagtcacagaattgaacattccctttgatagaacagggttgaaacactccttttctcatatctggaagtgtccatttggagcgcattcaggcttgtgttgaaaaaggaaatatcttcccataacaactagacagaagcattctcagaaactagtttctgatgtgtgtcctcaactaacacagttgaacatttctttagacagaacagttttgaaacactctttttgtggaatctgcaagtggatatttggctagatttgagcatttcgttggaaacgggattacatataaaaagcacacagcagcgttctgagaaacatcttagtgatgtttgtattcaggacacagagttgaacgttccctatcatagagcaggtttgaatcactccttttgtagtatctggaagtggacatttggagcgctttccggcctcaggtgaaaaaggaaatatcttcccataaaaactagacagaagcattctcagaaacttactcgtgatgtgtgtcctcaactaaaggggtagaacctttcttttgatagagcagttttgaaacactctttttgtagaatctgcaagtggatatttcgatagctttgtggatttcgttggaaacgggaatatcttcatataaaatctagagagaagtattatcagaaacttccttgtgatggttgcattcaagtcacagagttgaacattcgctttcatagagcatgtttgaaacactctttttccattacctggaagtggacatttggagcgctttgaggcctatggtgaaaaaagaaatatcttctcaaaaaaactacacagaagcattctcagaaacttatttgtgatgtgtgtcctcaactgacagagttgaacatttcttttgagagaggagttttgaaacactctttttgtggaatctgcaagtggatatttggctggctttgaggatttcgttggaaacgggaatacatataaaaagcagacagcagcgttctgagaaacttcttggtgatgtttgcattcaagtcacagaatggaacgttccctttcatagaacaggtttgaaactccccttttgtcgtatctggaagtgtccatttgtagcgcattctggcttgtgttgaaaaaggaaatatcttcccataaaaactagacagaagcattctcagaaactagtttctgatgtgtgtcctcaactaacacagttgaacatttctttagacagaacagttttgaaacactctttttgtggaatctgcaagtggatatttggctagatttgagcatttcgttggaaacgggattacatataaaaagcacacagcagcattctcagcaacttctttgtgatgtttgcattcaagtcacagaattgaacattccctttcacagagcaggtttgaaacactctttttgtagtgtctgtaactggacttttggagcgctttccggcctaaggtgaaaaaggacatatcttcccataaaaactagacagaagcattgtcagaaacttactcgtgatgtgtgtcctcaactgacggagtagaacctttcttttgatagagcagttttgaaacactctttttgtagaatctccaagtggatatttggatagctttgaggatttcgttggaaacgggaatatcttcatataaaacctagacagaagcattctcagaaactttccttgtgatggttgcattcaagtcacggagttgaacattggctttcatagagcaggttggaaacactctttttccattccctggaagtggacatttggagcgctttgaggcctatggtgaaaaaggaaatatcttcccataaaaactagacagaagcattctcagaaacttctttgtgatgtgtgtcctcaactgacagagttgaacatgtcttttgagagagcagttttgaaacactctttctgtggaacctgcaagtggatatttggctggctttgacgatttcgttggaaacgggaatacatataaaaagcagacagcagcgttctgagaaactacttggtgatgtttgcattcaagtcacagaatggaacgttccctttcacagaacaggtttgaaacactccttttgtcgtatctggaagtgtccatttggagcgcattcaggcttgtgttggaaaaggaaatatcttcccataaaaaccagacagaagccttctcggcaacttgtttgtgatgtgtgccctctactaacagagtcgaacctttctattcatagagcagttttgaaacactctttctgtagaatctgcaggagcatatttgcatatctttgaggatttcgttggaaacgggattgtcttcagataaaatccagacagaagcattctcagaaacttctttgggatgtttgcattgacgtcactgaggagaacatgccctttcgtagagaaggtttgaaacactctctttgcagtatctggaagtggacatttgaagcggtttcaggcctatgttgaaaaaggaaatatcttcccgtaacaactggacagaagcattctcagaagctagtctctgatgtgtgtcctcaactaacagagttgaacatttctttggagagtatagttttgaaacactctttttgtggagtctgcaagtggatatttggctggatttgaggatttcgttggaaacgggataaggtataaaaagcagacagcagcattctcagcaatttctctgtgatgtttgcattcaagtcacagaattgaacattccctttcacagagcaggtttgaaacactctttttgtagtgtctgtaactggacttttggagcgctttccggcctaaggtgaaaaaggacatatcttcccataaaaactagacagaagcattgtcagaaacttactcgtgatgtgtgtcctcaactgacggagtagaacctttcttttgatagagcagttttgaaacactctttttgtagaatctccaagtggatatttggatagctttgaggatttcgttggaaacgggaatatcttcatataaaacctagacagaagcattctcagaaacttccttgtgatggttgcattcaagtcacggagttgaacattggctttcatagagcaggttggaaacactctttttccattccctggaagtggacatttggagcgctttgaggcctatggtgaaaaaggaaatatcttcccataaaaactagacagaagcattctcagaaacttcattgtgatgtgtgtcctcaactgacagagttgaacatgtcttttgagagagcagttttgaaacactctttctgtggaacctgcaagtggatatttggctggctttgacgatttcgttggaaacgggaatacatataaaaagcagacagcagcgttctgagaaacttcttggtgatgtttgcattcaagtcactgaatggaaagttccctttcatagaacaggtttgaaactctccttttgtcgtaactggaagtgtccatttcgagcgcattcaggcttgtgttgaaaaaggaaatatcttcccataaaaactagacagaagcattctcagcaacttgtttgtgatgtgtgccctctactaacagagttgaacctttcttttcatagagcagttttgaaacactctttttgtagaatctgcaggaggatatttgcatagctttgaggatttcgttggaaatgggattgtcttcagataaaatccagacagaagcattctcagaaacttcgctgggatgtttgcatacaagtcacagaggagaacatgccctttcgtagagaaggcttgaaacatactctttctagtatctggaagtggacatttggagaagtttcaggcctaagttgaaaaaggaaatatcttcccttaaaaactggacagaagcattctcagaagatagtctctaatgtgtgtcctcaactaacagagttgaagatttgtgtagacagaaaagttttgaaacactctttttgtggagtctgcaagtggatatttggatagctgtgaggatttcattggaaacgggaatatcttcatataaaatctagacagaagcattctcagaaactactttgtgatgtttgcattcaagtcacagaattgaacattccctttcacagagcaggtttgaaacacactttttgtagtgtctgtaagtggacatttggagcgctttccggcctaaggtgaaaaaggacatatcttcccataaaaactagacagaagcattctcagaaacttactcgtgatgtgtgtcctcaactaacggagtagaaactttcttttgatagagcagtagtgaaacactctttttgtagaatctgcaagtgtatatttggatagctttgaggatttcattggaaacgggaatatcttcatataaaatcaagacagaagaattctcagaaacttccttgtgatggttgcattcaagtcacggagttgaacattccctttcatagagcaggttggaaacattcttttagcattccctggaagtggacatttggagcgctttgaggcctatggtgaaaaaggaaatatcttctcttcaaaactagacagaagcattctcagaaacttatttgtgatgtgtgttctcaactgacagagttgaacatttcttttgagagagcagttttgaaacactctttttgtggaatctgcaagtggatatttggctggcgttgacgacttcgttggaaacgggaatacatataaaaagcagacagcagcgttctgaggaagttcttggtgatgtttgcattcaagtcacagaatggaacgttccctttcatagaagaggtttgaaactctccttttgtcgtatctggaagtgtccatttggagcgcattcaggcttgtgttgaaaaaggaaatatcttcccataaaaactagacagaagcattctcagcaacttgtttgtgatgtgtgccctctactaacagagttgaacctttcttttcatagagcagttttgaaacactctttttgtagaatctgcaggaggatatttgcatagctttgaggatttcgttggaaacgggattgtcttcagataaaatccagacagaagcattctcagaaacttcgctgggatgtttccattcaagtcacagaggagaacatgccctttcgtagagaaggtttgaaacacactttttgtagtatctggaagtggacatttggagcggttgcaggcctatgttgaaaaaggaaatatcttcccgtaacaactggacagaagcattttcagaagctagtctatgatgtgtgtcctcaactaacagagttgaacatttctttagacagaagagttttgaaacactctttttgtggagtctgcaagtggatatttggctagatttgaggatttcgttggaaacgggattacgtataaaaagcagacagcagcattctcagcaacttctttgtgatgtttgcattcaagtcacagaattgaacattccctttcacatagcaggtttgaaacactctttttgtagtgtctgtaactggacttttggagcgctttccggcctaaggtgaaaaaggacatatcttcccataaaaactagacagaagcattgtcagaaacttactcgtgatgtgtgtcctcaactgacggagtagaacctttcttttgatagagcagttttgaaacactctttttgtagaatctccaagtggatatttggatagctttgaggatttcgttggaaacgggaatatcttcatataaaacctagacagaagcattctcagaaacttccttgtgatggttgcattcaagtcacggagttgaacattggctttcatagagcaggttggaaacactctttttccattccctggaagtggacatttggagcgctttgaggcctatggtgaaaaaggaaatatcttcccataaaaactagacagaagcattctcagaaacttctttgtgatgtgtgtcctcaactgacagagttgaacatgtcttttgagagagcagttttgaaacactctttctgtggaacctgcaagtggatatttggctggctttgacgatttcgttggaaacgggaatacatataaaaagcagacagcagcgttctgagaaactacttggtgatgtttgcattcaagtcacagaatggaacgttccctttcacagaacaggtttgaaacactccttttgtcgtatctggaagtgtccatttggagcgcattcaggcttgtgttggaaaaggaaatatcttcccataaaatccagacagaagcattctcggcaacttgtttgtgatgtgtgccctctactaacagagtcgaacctttcttttcatagagcagttttgaaacactctttttgtagaatctgcaggagcatatttgcatatctttgaggatttcgttggaaacgggattgtcttcagataaaatccagacagaagcattctcagaaacttctttgggatgtttgcattgacgtcactgaggagaacatgccccttcgtagagaaggtttgaaacactctctttgcagtatctggaagcggacatttgaagctgtttcaggcctatgttgaaaaaggaaatatcttcccgtaacaactggacagaagcattctcagaagctagtctctgatgtgtgtcctcaactaacagagttgaacatttctttggagagtatagttttgaaacactctttttgtggagtctgcaagtggatatttggctggatttgaggatttcgttgaaaacgcgataaggtataaaaagcagacagcagcattctcagcaatttctttgtgatgtttgcattcaagtcacagaattgaacattccctttcacagagcaggtttgaaacactctttttgtagtgtctgtaactggacttttggagcgctttccggcctaaggtgaaaaaggacatatcttcccataaaaactagacagaagcattgtcagaaacttactcgtgatgtgtgtcctcaactgacgtagtagaacctttcttttgatagagcagttttgaaacactctttttgtagaatctccaagtggatatttggatagctttgaggatttcgttggaaacgggaatatcttcatataaaacctagacagaagcattctcagaaacttccttgtgatggttgcattcaagtcacggagttgaacattggcattcatagagcaggttggaaacactctttttccattccctggaagtggacatttggagcgctttgaggcctatggtgaaaaaggaaatatcttcccataaaaactagacagaagcattctcagaaacttctttgtgatgtgtgtcctcaactgacagagttgaacatgtcttttgagagagcagttttgaaacactctttttgtggaacctgcaagtggatatttggctggctttgacgatttcgttggacacgggaatacatataaaaagcagacagcagcgttctgagaaacgtcttggtgatgtttgcattcaagtcacagaattgaacattccctttgatggaacaggtttgaaacactccttttctcatatctggaagtgtccattcggagcgcattcaggcttgtgttgaaaaaggatatatcttcccataacaactagacagaagcattctcagaaactagtttctgatgtgtgtcctcaactaacacagttgaacatttctttagacagaacagttttgaaacactctttttgtggaatttgcaagtggatatttggctagatttgagcatttcgttggaaacgggattacatataaaaagcagacagcagcattctcagaaacttctttgtgatgtttgcattcaagtcacagaattgaacattccctttcacagatcaggtttgaaaccctctttttgtagtgtctgtaagtggacgtttggagcgctttccggcctaaggtgaaaaaggacatatcttcccataaaaactacacagaagcattctcagaaacttactcgtgatgtgtgtcctcaactaaaggggtagaacctttcttttgatagagcagttttgaaacactctttttgtagaatctgcaagtggatacttcgatagctttgtggatttcgttggaaacgggaatatcttcatataaaatctagagagaagcattctcagaaacttccttgtgatggttgcattaaagtcacagagttgaacattcggtttcatagagcaggttggaaacactctttttccattccctggaagtggacatttggagcgcttcgaggcctatggtgaaaaaggaattatcttcccataaaaactagacagaagcattctcagaaacttatttgtgatgtgtgtcctcaactaacagagttgaacatttcttttgagagagcagttttgaaacactctttttgtggaacctgcaagtggatatttggctggctttgacgatttcgttggaaacgggaatacatataaaaagcagacagcagcgttctgagaaacttcttggtgatgtttgcattcaagtcacagaatggaacgttccctttcatagaacaggtttgaaacactccttttgtcgtatctgcaagtgtccatttagagcgcattcaggcttgtgttgaaaaaggaaatatcttcccataaaaactagacagaagcattctcagcaacttgtttgtgatgtgtgccctctactaacagagttgaacctttcttttcatagactagttttgaaacactctttttgtagaatctggaggaggatatttgcatagctttgaggatttcgttggaaacgggattgtcttcagatataatccagacagaagcactctcagaaacttttttgggatgtttgcattcaagtcacagaggagaacatgccttttcgtagagaagttttcaaacactgtttttgtagtatctgaaagtggacatttggagcggtttcaggactatgttgaaaaagcaaatatcttcccggaacacctggacagaagcattctcagaagctagtctctgatgtgtgtcctcaactaacagagttgaacatttcttttgacagtacagttttgaaacactctttttgtggagtctgcaagtggatatttggctggatttgaggatttcgttggaaacgggataaggtataaaaagcagacagcagcattctcagcaacttctttgtgatgtttgcattcaagtcacagaattgaacattccctttcacagagcaggtttgaaacactctttttgtagtgtctgtaactggacttttggagcgctttccggcctaaggtgaaaaaggacatatcttcccataaaaactagacagaagcattgtcagaaacttactcgtgatgtgtgtcctcaactgacggagtagaacctttcttttgatagagcagttttgaaacactctttttgtagaatctccaagtggatatttgggtagctttgaggatttcgttggaaacgggaatatcttcatataaaacctagacagaagcattctcagaaacttccttgtgatggttgcattcaagtcacggagttgaacattggctttcatacagtaggttggaaacactctttttccattccctggaagtggacatttggagcgctttgaggcctatggtgaaaaaggaaatatcttcccataaaaactagacagaagcattctcagaaacttctttgtgatgtgtgtcctcaactgacagagttgaacatgtcttttgagagagcagttttgaaacactctttctgtggaacctgcaagtggatatttggcgggctttgacgatttcgttggaaacgggaatacatataaaaacagacagcagcgttctgagaaactacttggtgatgtttgcattcaagtcacagaatggaacgttccctttcacagaacaggtttgaaacactccttttgtcgtatctcgaagtgtccatttggagcgcattcaggcttgtgttggaaaaggaaatatcttcccataaaaaccagacagaaacattctcggcaacttgtttgtgatgtgtgccctctactaacagagtcgaacctttcttttcatagagcagttttgaaacactctttttgtagaatctgcaggagcatatttgcatatctttgaggatttcgttggaaacgggattgtcctcagataaaatccagacagaagcattctcagaaacttctttgggatgtttgcattgacgtcactgaggagaacatgccctttcgtagagaaggtttgaaacactctctttgcagtatctggaagtggacatttgaagcggtttcaggcctatgttgaaaaaggaaatatcttcccgtaacaactggacagaagcattctcagaagctagtctctgatgtgtgtcctcaactaacagagttgaacatttctttggagagtatagttttgaaacactctttttgtggagtctgcaagtggatatttggctggatttgaggatttcgttggaaacgggataaggtacaaaaagcagacagcagcattctcagcaacttctttgtgatctttgcattcaagttacagaattgaacattccctttcacagagcaggtttgaaacactctttttgtagtgtctgtaactggacttttggagcgctttccggcctaaggtgaaaaaggacatatcttcccataaaaactagacagaagcattgtcagaaacttactcgtgatgtgtgtcctcaactgacggagtagaacctttcttttgatagagcagttttgaaacactctttttgtagaatctccaagtggatatttggatagctttgaggatttcgttggaaacgggaatatcttcatataaaacctagacagaagcattctcagaaacttccttgtgatggttgcattcaagtcacggagttgaacattggcattcatagagcaggttggaaacactctttttccattccctggaagtggacatttggagcgctttgaggcctttggtgaaaaaggaaatatcttcccataaaaactagacagaagcattctcagaaacttctttgtgatgtgtgtcctcaactgacagagttgaacatgtcttttgagagagcagttttgaaacactctttctgtggagcctgcaagtggatatttggctggctttgacgatttcgttggaaacgggaatacatataaaaagcagacagcagcgttctgagaaactacttggtgatgtttgcattcaagtcacagaatggaacgttccctttcacagaacaggtttgaaacactccttttgtcgtatctggaagtgtccatttggagcgcattcaggcttgtgttggaaaaggaaatatcttcccataaaaaccagacagaagcattctcggcaacttgtttgtgatgtgtgccctctactaacagagtcgaacctttcttttcatagagcagttttgaaacactctttttgtagaatctgcaggagcatatttgcatatctttgaggatttcgttggaaacgggattgtcttcagataaaatccagacagaagcattctcagaaacttctttgggatgtttgcattgacgtcactgaggagaacatgccccttcgtagagaaggtttgaaacactctctttgcagtatctggaagcggacatttgaagcggtttcaggcctatgttgaaaaaggaaatatcttcccgtaacaactggacagaagcattctcagaagctagtctctgatgtgtgtcctcaactaacagagttgaacatttctttggagagtatagttttgaaacactctttttgtggagtctgcaagtggatatttggctggatttgaggatttcgttggaaacgcgataaggtataaaaagcagacagcagcattctcagcaatttctttgtgatgtttgcattcaagtcacagaattgaacattccctttcacagagcaggtttgaaacactctttttgtagtgtctgtaactggacttttggagcgctttccggcctaaggtgaaaaaggacatatcttcccataaaaactacacagaagcattgtcagaaacttactcgtgatgtgtgtcctcaactgacggagtagaacctttcttttgatagagcagttttgaaacactctttttgtagaatctccaagtggatatttggatagctttgaggatttcgttggaaacgggaatatcttcatataaaacctagacagaagcattctcagaaacttccttgtgatggttgcattcaagtcacggagttgaacattggctttcatagagcaggttggaaacactctttttccattccctggaagtggacatttggagcgctttgaggcctatggtgaaaaaggaaacatcttcccataaaaactagacagaagcattctcagaaacttctttgtgatgtgtgtcctcaactgacagagttgaacatgtcttttgagagagcagttctgaaacactctttctgtggaacctgcaagtggatatttggctggctttgacgatttcgttggaaacgggaatacatataaaaagcagacagcagcgttctgagaaactacttggtgatgtttgcattcaagtcacagaatggaacgttccctttcacagaacaggtttgaaacactccttttgtcgtatctggaagtgtccatttggagcgcattcaggcttgtgttggaaaaggaaatatcttcccataaaaaccagacagaagccttctcggcaacttgtttgtgatgtgtgccctctactaacagagtcgaacctttctattcatagagcagttttgaaacactctttctgtagaatctgcaggagcatatttgcatatctttgaggatttcgttggaaacgggattgtcttcagataaaatccagacagaagcattctcagaaacttctttgggatgtttgcattgacgtcactgaggagaacataccctttcgtagagaaggtttgaaacactctctttgcagtatctggaagtggacatttgaagcggtttcaggcctatgttgaaaaaggaaatatcttcccgtaacaactggacagaagcattctcagaagctagtctctgatgtgtgtcctcaactaacagagttgaacatttcttcggagagtatagttttgaaacactctttttgtggagtctgcaagtggatatttggctggatttgaggatttcgttggaaacgggataaggtataaaaagcagacagcagcattctcagcaatttctttgtgatgtttgcattcaagtcacagaattgaacattccctttcacagagcaggtttgaaacactctttttgtagtgtctgtaactggacttttggagcgctttccggcctaaggtgaaaaaggacatatcttcccataaaaactagacagaagcattgtcagaaacttactcgtgatgtgtgtcctcaactgacggagtagaacctttcttttgatagagcagttttgaaacactctttttgtagaatctccaagtggatatttggatagctttgaggatttcgttggaaacgggaatatcttcatataaaacctagacagaagcattctcagaaacttccttgtgatggttgcattcaagtcacggagttgaacattggctttcatagagcaggttggaaacactctttttccattccctggaagtggacatttggtgcgctttgaggcctatggtgaaaaaggaaatatcttcccataaaaactagacagaagcattctcagaaacttctttgtgatgtgtgtcctcaactgacagagttgaacatgtcttttgagagagcagttctgaaacactctttctgtggaacctgcaagtggatatttggctgactttgacgatttcgttggaaacgggaatacatataaaaagcagacagctgcgttctgagaaactacttggtgatgtttgcattcaagtcacagaatggaaccgttccctttcacagaacaggtttgaaacactccttttgtcgtatctggaagtgtccatttggagcgcattcaggcttgtgttggaaaaggaaatatcttcccaaaaaaatcagacagaagcattctcagcaacttgtttgtgatgtgtgccctctactaacagagttgaacctttcttttcatagagcagttttgaaacactctttttgtagaatctgcaggaggatatttgcatagctttgaggatttcgttggaaacgggattgtcttcagataaaatccagacagaagcattctcagaaacttcgctgggatgtttccattcaactcgcaggggagaacatgccctttcgtagagaaggtttgaaacactctttttgtagtatctggaagtggacatttggagcggtttcaggcctatgttgaaaaaggaaatatcttcccgtaacaactggacagaagcattttcagaagctagtctatgatgtgtgtcctcaactaacagagttgaacatttctttagacagaagagttttgaaacactctttttgtggagtctgcaagtggatatttggctagatttgaggatttcgttggaaacgggattacgtataaaaagcagacagcagcattctcagcaacttctttgtgatgtttgcattcaagtcacagaattgaacattccctttcacatagcaggtttgaaacactctttttgtagtgtctgtaactggacttttggagcgctttccggcctaaggtgaaaaaggacatatcttcccataaaaacttgacagaagcattgtcagaaacttactcgtgatgtgtgtcctcaactgacggagtagaacctttcttttgatagagcagttttgaaacactctttttgtagaatctccaagtggatatttggatagctttgaggatttcgttggaaacgggaatatcttcatataaaacctagacagaagcattctcagaaacttccttgtgatggttgcattcaagtcacggagttgaacattggctttcatagagcaggttggaaacactctttttccattccctggaagtggacatttggagcgctttgaggcctatggtgaaaaaggaaatatcttcccataaaaactagacagaagcattctcagaaacttctttgtgatgtgtgtcctcaactgacagagttgaacatgtcttttgagagagcagttttgaaacactctttctgtggaacctgcaagtggatatttggcgggctttgacgatttcgttggaaacgggaatacatataaaaacagacagcagcgttctgagaaactacttggtgatgtttgcattcaagtcacagaatggaacgttccctttcacagaacaggtttgaaacactccttttgtcgtatctcgaagtgtccatttggagcgcattcaggcttgtgttggaaaaggaaatatcttcccataaaaaccagacagaaacattctcggcaacttgtttgtgatgtgtgccctctactaacagagtcgaacctttcttttcatagagcagttttgaaacactctttttgtagaatctgcaggagcatatttgcatatctttgaggatttcgttggaaacgggattgtcctcagataaaatccagacagaagcattctcagaaacttctttgggatgtttgcattgacgtcactgaggagaacatgccctttcgtagagaaggtttgaaacactctctttgcagtatctggaagtggacatttgaagcggtttcaggcctatgttgaaaaaggaaatatcttcccgtaacaactggacagaagcattctcagaagctagtctctgatgtgtgtcctcaactaacagagttgaacatttctttggagagtatagttttgaaacactctttttgtggagtctgcaagtggatatttggctggatttgaggatttcgttggaaacgggataaggtataaaaagcagacagcagcattctcagcaatttctttgtgatgtttgcattcaagtcacagaattgaacattccctttcacagagcaggtttgaaacactctttttgtagtgtctgtaactggacttttggagcgctttccggcctaaggtgaaaaaggacatatcttcccataaaaactagacagaagcattgtcagaaacttactcgtgatgtgtgtcctcaactgacggagtagaacctttcttttgatagagcagttttgaaacactctttttgtagaatctccaagtggatatttggatagctttgaggatttcgttggaaacgggaatatcttcatataaaacctagacagaagcattctcagaaacttccttgtgatggttgcattcaagtcacggagttgaacattggctttcatacagtaggttggaaacactctttttccattccctggaagtggacatttggagcgctttgaggcctatggtgaaaaaggaaatatcttcccataaaaactagacagaagcattctcagaaacttctttgtgatgtgtgtcctcaactgacagagttgaacatgtcttttgagagagcagttttgaaacactctttctgtggaacctgcaagtggatatttggctggctttgacgatttcgttggaaacgggaatacatataaaaagcagacagcagcgttctgagaaactacttggtgatgtttgcattcaagtcacagaatggaacgttccctttcacagaacaggtttgaaacactccttttgtcgtatctggaagtgtccatttggagcgcattcaggcctgtgttggaaaaggaaatatcttcccataaaaaccagacagaagccttctcggcaacttgtttgtgatgtgtgccctctactaacagagtcgaacctttctattcatagagcagttttgaaacactccttttgtagaatctgaaggagcatatttgcatatctttgaggatttctttggaaacgggattgtcttcagataaaatccagacagaagcattctcagaaacttctttgggatgtttgcattgacgtcacagaggagaacatgccctttcgtagagaaggtttgaaacactctctttgcagtatctggaagtggacatttgaagtggtttcaggcctatgttgaaaaaggaaatatcttcccgtaacaactggacagaagcattctcagaagctagtctctgatgtgtgtcctcaactaacagagttgaacatttcttttgacagtacagttttgaaacactctttttgtggagtctgcaagtggatatttggctggatttgaggatttcgttggaaacgggataaggtataaaaagcagacagcagcattctcagcaacttctttgtgatctttgcattcaagttacagaattgaacattccctttcacagagcaggtttgaaacactctttttgtagtgtctgtaactggacttttggagcgctttccggcctaaggtgaaaaaggacatatcttcccataaaaactagacagaagcattctcagaagtttatttgtgatgtgtgccctcaactaacagagttgaacctttcttttgatagagcagttttgaaacactctttttgtaaaatctgcaagaggatatttggatagctttgaggatttcgttggaaacgggaatatcttcatataaaacctagacagaagcattctcagaaacttccttgtgatggttgcattcaagtcacggagttgaacattcgctttcatagagcaggttggaaacactctttttccattccctggaagtggacatttggagcgctttttaggcctatggtgaaaaaggaaatatcttcccatcaaaactagatagaagcattctcagaaacttatttgtgatgtgtgtcctcaaatgacagagttgaacatttgttttgagagagcagttttgaaacactctttttatggaatctgcaagcggatatatggctggctttgacgatttagttggaaacgggaatacatataaaaaatagacagcagcgttctgagaaacttcttggtgatgtttgcattcaagtcacagaatggaacgttctctttcatagaacaggtttgaaaaactccttttgtcgtatgtggaagtgtccctttggagtgcattcaggcttgtgttgaaaaaggaaatatcttcccataaaaactagacagaagcattctcggcaacttgtttgtgatgtgtgtcctctactaacagagtcgaacctttcttttcatagagcagttttgaaacactctttttgtagaatctgcaggagcatatttgcatatctttgaggatttcgttggaaacgggattgtcttcagataaaatccagacagaagcattctaagaaacttctttgggatgtttgcattgacgtcactgaggagaacatgccctttcgtagagaaggtttgaaacactctctttgcagtatcaggaagtggacatttgaagcggtttcaggcctatgttgaaaaaggaaatatcttcccgtaacaactggacagaagcattctcagaagctagtctctgatgtgtgtcctcaactaacagagttgaacatttctttggagagtatagttttgaaacactctttttgtggagtctgcaagtggatatttggctggatttgaggatttcgttggaaacgcgataaggtataaaaagcagacagcagcattctcagcaacttctttgtgatgtttgcattcaagtcacagaattgaacattccctttcacatagcaggtttgaaacactctttttgtagtgtctgtaactggacttttggagcgctttccggcctaaggtgaaaaaggacatatcttcccataaaaactagacagaagcattgtcagaaacttactcgtgatgtgtgtcctcaactgacggagtagaacctttcttttgatagagcagttttgaaacactctttttgtagaatctccaagtggatatttggatagctttgaggatttcgttggaaacgggaatatcttcatataaaacctagacagaagcattctcagaaacttccttgtgatggttgcattcaagtcacggagttgaacattggctttcatacagtaggttggaaacactctttttccattccctggaagtggacatttggagcgctttgaggactatggtgaaaaaggaaatatcttcccataaaaactagacagaagcattctcagaaacttctttgtgatgtgtgtcctcaactgacagagttgaacatgtcttttgagagagcagttttgaaacactctttctgtggaacctgcaagtggatatttggctggctttgacgatttcgttggaaacgggaatacatataaaaagcagacagcagcgttctgagaaactacttggtgatgtttgcattcaagtcacagaatggaacgttccctttcacagaacaggtttgaaacactccttttgtcgtatctggaagtgtccatttggagcgcattcaggcttgtgttggaaaaggaaatatcttcccataaaaaccagacagaagcattctcggcaacttgtttgtgatgtgtgccctctactaacagagtcgaacttttcttttcatagagcagttttgaaacactctttttgtagaatctgcaggagcatatttgcatatctttgaggatttcgttggaaacgggattgtcttcagataaaatccagacagaagcattctcagaaacttctttgggatgtttgcattgacgtcactgaggagaacatgccccttcgtagagaaggtttgaaacactctctttgcagtatctggaagcggacatttgaagctgtttcaggcctatgttgaaaaaggaaatatcttcccgtaacaactggacagaagcattctcagaagctagtctctgatgtgtgtcctcaactaacagagttgaacatttctttggagagtatagttttgaaacactctttttgtggagtctgcaagtggatatttggctggatttgaggatttcgttggaaacgcgataaggtataaaaagcagacagcagcattctcagcaatttctttgtgatgtttgcattcaagtcacagaattgaacattccctttcacagagcaggtttgaaacactctttttgtagtgtctgtaactggacttttggagcgctttccggcctaaggtgaaaaaggacatatcttcccataaaaactagacagaagcattgtcagaaacttactcgtgatgtgtgtcctcaactgacggaatagaacctttcttttgatagagcagttttgaaacactctttttgtagaatctccaagtggatatttggatagctttgaggatttcgttggaaacgggaatatcttcatataaaacctagacagaagcattctcagaaacttccttgtgatggttgcattcaagtcacggagttgaacattggctttcatagagcaggttggaaacactctttttccattccctggaagtggacatttggagcgctttgaggcctatggtgaaaaaggaaatatcttcccataaaaactagacagaagcattctcagaaacttctttgtgatgtgtgtcctcaactgacagagttgaacatgtcttttgagaaagcagttttgaaacaatctttctgtggaacctgcaagtggatatttggctggctttgacgatttcgttggaaacgggaatacatataaaaagcagacagcagcgttctgagaaactacttggtgatgtttgcattcaagtcacagaatggaacgttccctttcacagaacaggtttgaaacactccttttgtcgtatctcgaagtgtccgtttggagcgcattcaggcttgtgttggaaaaggaaatatcttcccataaaaatcagacagaagccttctcggcaacttgtttgtgatgtgtgccctctactaacagagtcgaacctttctattcatagagcagttttgaaacactccttttgtagaatctgaaggagcatatttgcatatctttgaggatttctttggaaacgggattgtcttcagataaaatccagacagaagcattctcagaaacttctttgggatgtttgcattgacgtcacagaggagaacatgccctttcgtagagaaggtttgaaacactctctttgcagtatctggaagtggacatttgaagtggtttcaggcctatgttgaaaaaggaaatatcttcccgtaacaactggacagaagcattctcagaagctagtctctgatgtgtgtcctcaactaacagagttgaacatttcttttgacagtacagttttgaaacactctttttgtggagtctgcaagtggatatttggctggatttgaggatttcgttggaaacgggataaggtataaaaagcagacagcagcattctcagcaacttctttgtgatgtttgcattcaagtcacagaattgaacattccctttcacagagcaggtttgaaacactctttttgtagtgtctgtaactggacttttggagcgctttccggcctaaggtgaaaaaggacatatcttcccataaaaactagacagaagcattgtcagaaacttactcgtgatgtgtgtcctcaactgacggagtagaacctttcttttgatagagcagttttgaaacactctttttgtagaatctccaagtggatatttggatagctttgaggatttcgttggaaacgggaatatcttcatataaaacctagacagaagcattctcagaaacttccttgtgatggttgcgttcaagtcacggagttgaacattggctttcatagagcaggttggaaacactctttttccattccctggaagtggacatttggagcgctttgaggcctatggtgaaaaaggaaatatcttcccataaaaactagacagaagcattctcagaaacttctttgtgatgtgtgtcctcaactgacagagttgaacatgtcttttgagagagcagttctgaaacactctttctgtggaacctgcaagtggatatttggctggctttgacgatttcgttggaaacgggaatacatataaaaagcagacagcagcgttctgagaaactacttggtgatgtttgcattcaagtcacagaatggaacgttccctttcacagaacaggtttgaaacactccttttgtcgtatctggaagtgtccatttggagcgcattcaggcttgtgttggaaaaggaaatatcttcccataaaaaccagacagaagccttctcggcaacttgtttgtgatgtgtgccctctactaacagagtcgaacctttctattcatagagcagttttgaaacactctttttgtagaatctgcaggagcatatttgcatagctttgaggatttcgttggaaacgggattgtcttcagataaaatccagacagaagcattctcagaaacttctttgggatgtttgcattgacgtcactgaggagaacatgccctttcgtagagaaggtttgaaacactctctttgcagtatctggaagtggacatttgaagcggtttcaggcctatgttgaaaaaggaaatatcttcccgtaacaactggacagaagcattctcagaagctagtctctgatgtgtgtcctcaactaacagagttgaacatttctttggagagtatagttttgaaacactctttttgtggagtctgcaagtggatatttggctggatttgaggatttcgttggaaacgggataaggtataaaaagcagacagcagcattctcagcaatttctttgtgatgtttgcattcaagtcacagaatttaacattccctttcacagagcaggtttgaaacactctttttgtagtgtctgtaactggacttttggagcgctttccggcctaaggtgaaaaaggacatatcttcccataaaaactagacagaagcattgtcagaaacttactcgtgatgtgtgtcctcaactgacggagtagaacctttcttttgatagagcagttttgaaacactctttttgtagaatctccaagtggatatttggatagctttgaggatttcgttggaaacgggaatatcttcatataaaacctagacagaagcattctcagaaacttccttgtgatggttgcattcaagtcacggagttgaacattggctttcatacagtaggttggaaacactctttttccattccctggaagtggacatttggagcgctttgaggactatggtgaaaaaggaaatatcttcccataaaaactagacagaagcattctcagaaacttctttgtgatgtgtgtcctcaactgacagagttgaacatgtcttttgagagagcagttttgaaacactctttctgtggaacctgcaagtggatatttggctggctttgacgatttcgttggaaacgggaatacatataaaaagcagacagcagcgtctgagaaactacttggtgatgtttgcattcaagtcacagaatggaacgttccctttcccagaaaaggtttgaaacactcctttagtcgtatctggaagtgtccatttggagcgcattcaggcttgtgttggaaaaggaaatatcttcccataaaaaccagacagaagcattctcggcaacttgtttgtgatgtgtgccctctactaacagagtcgaacctttctattcatagagcagttttgaaacactctttttgtagaatctgcaggagcatatttgtatatctttgaggatttggttggaaacgggattgtcttcagataaaatccagacagaagcattctcagaaagttctttgggatgtttgcattgacgtcacagaggagaacatgccctttcgtagagaaggtttgaaacactctctttgcagtatctggaagtggacatttgaagcggtttcaggcctatgttgaaaaaggaaatatcttcccgtaacaactggacagaagcattctcagaagctagtctctgatgtgtgtcctcaactaacagagttgaacatttctttggagagtatagttttgaaacactctctttatggagtctgcaagtggatatttggctggatttgaggatttcgttggaaacgcgataaggtataaaaagcagacagcagcattctcagcaacttctttgtgatgtttgcattcaagtcacagaattgaacattccctttcacagagcaggtttataacactctttttgtagtgtctgtaactggacttttggagcgctttccggcctaaggtgaaaaaggacatatcttcccataaaaactagacagaagcattgtcagaaacttactcgtgatgtgtgtcctcaactgacggagtagaacctttcttttgatagagcagttttgaaacactctttttgtagaatctccaagtggatatttggatagctttgaggatttcgttggaaacgggaatatcttcatataaaacctagacagaagcattctcagaaacttccttgtgatggttgcattcaagtcacggagttgaacattggctttcatagagcaggttggaaacactctttttccattccctggaagtggacatttggagcgctttgaggcctatggtgaaaaaggaaatatcttcccataaaaactagacagaagcattctcagaaacttctttgtgatgtgtgtcctcaactgacagagttgaacatgtcttttgagagagcagttttgaaacactctttctgtggaacctgcaagtggatatttggcgggctttgacgatttcgttggaaacgggaatacatataaaaacagacagcagcgttctgagaaactacttggtgatgtttgcattcaagtcacagaatggaacgttccctttcacagaacaggtttgaaacactccttttgtcgtatctcgaagtgtccatttggagcgcattcaggcttgtgttggaaaaggaaatatcttcccataaaaaccagacagaaagcattctcggcaacttgtttgtgatgtgtgccctctactaacagagtcgaacttttcttttcatagagcagttttgaaacactctttttgtagaatctgcaggagcatatttgcatatctttgaggatttcgttggaaacgggattgtcttcagataaaatccagacagaagcattctcagaaagttctttgggatgtttgcattgacgtcacagaggagaacatgccctttcgtagagaaggtttgaaacactctctttgcagtatctggaagtggacatttgaagcggtttcaggcctatgttgaaaaaggaaatatcttcccgtaacaactggacagaagcattctcagaagctagtctctgatgtgtgtcctcaactaacagagttgaacatttctttggagagtatagttttgaaaaactctttttgtggagtgtgcaagtggatatttggctggatttgaggatttcgttggaaacgggataaggtataaaaagcagacagcagcattctcagcaatttctttgtgatgtttgcattcaagtcacagaattgaacattccctttcacagagcaggtttgaaacactctttttgtagtgtctgtaactggacttttggagcgctttccggcctaaggtgaaaaaggacatatcttcccataaaaactacacagaagcattgtcagaaacttactcgtgatgtgtgtcctcaactgacggagtagaacctttcttttgatagagcagttttgaaacactctttttgtagaatctccaagtggatatttggatagctttgaggatttcgttggaaacgggaatatcttcatataaaacctagacagaagcattctcagaaacttccttgtgatggttgcattcaagtcacggagttgaacattggctttcatagagcaggttggaaacactctttttccattccctggaagtggacatttggtgcgcattgaggcctatggtgaaaaaggaaatatcttcccataaaaactagacagaagcattctcagaaacttctttgtgatgtgtgtcctcaactgacagagttgaacatgtcttttgagagagcagttctgaaacactctttctgtggaacctgcaagtggatatttggctggctttgacgatttcgttggaaacgggaatacatataaaaagcagacagcagcgttctgagaaactacttggtgatgtttgcattcaagtcacagaatggaacgttccctttcacagaacaggtttgaaacactccttttgtcgtatctggaagtgtccatttggagcgcattcaggcttgtgttggaaaaggaaatatcttcccataaaaaccagacagaagccttctcggcaacttgtttgtgatgtgtgccctctactaacagagtcgaacctttctattcatagagcagttttgaaacactctttttgtagaatctgcaggagcatatttgcatatctttgaggatttcgttggaaacgggattgtcttcagataaaatccagacagaagcattctcagaaacttctttgggatgtttgcattgacgtcacagaggagaacatgccctttcgtagagaaggtttgaaacactctctttgcagtatctggaagtggacatttgaagtggtttcaggcctatgttgaaaaaggaaatatcttcccgtaacaactggacagaagcattctcagaagctagtctctgatgtgtgtcctcaactaacagagttgaacatttcttttgacagtacagttttgaaacactctttttgtggagtctgcaagtggatatttggctggatttgaggatttcgttggaaacgggataaggtataaaaagcagacagcagcattctcagcaacttctttgtgatgtttgcattcaagtcacagaattgaacattccctttcacagagcaggtttgaaacactctttttgtagtgtctgtaactggacttttggagcgctttccggcctaaggtgaaaaaggacatatcttcccataaaaactagacagaagcattgtcagaaacttactcgtgatgtgtgtcctcaactgacggagtagaacctttcttttgatagagcagttttgaaacactctttttgtagaatctccaagtggatatttgggtagctttgaggatttcgttggaaacgggaatatcttcatataaaacctagacagaagcattctcagaaacttccttgtgatggttgcattcaagtcacggagttgaacattggctttcatacagtaggttggaaacactctttttccattccctggaagtggacatttggagcgctttgaggcctatggtgaaaaaggaaatatcttcccataaaaactagacagaagcattctcagaaacttctttgtgatgtgtgtcctcaactgacagagttgaacatgtcttttgagagagcagttttgaaacactctttctgtggaacctgcaagtggatatttggcgggctttgacgatttcgttggaaacgggaatacatataaaaacagacagcagcgttctgagaaactacttggtgatgtttgcattcaagtcacagaatggaacgttccctttcacagaacaggtttgaaacactccttttgtcgtatctcgaagtgtccatttggagcgcattcaggcttgtgttggaaaaggaaatatcttcccataaaaatcagacagaagccttctcggcaacttgtttgtgatgtgtgccctctactaacagagtcgaacctttctattcatagagcagttttgaaacactccttttgtagaatctgaaggagcatatttgcatatctttgaggatttctttggaaacgggattgtcttcagataaaatccagacagaagcattctcagaaacttctttgggatgtttgcattgacgtcacagaggagaacatgccctttcgtagagaaggtttgaaacactctctttgtagtatctggaagtggacatttgaagtggtttcaggcctatgttgaaaaaggaaatatcttcccgtaacaactggacagaagcattctcagaagctagtctctgatgtgtgtcctcaactaacagagttgaacatttcttttgacagtacagttttgaaacactctttttgtggagtctgcaagtggatatttggctggatttgaggatttcgttggaaacgggataaggtataaaaagcagacagcagcattctcagcaacttctttgtgatgtttgcattcaagtcacagaattgaacattccctttcacagagcaggtttgaaacactctttttgtagtgtctgtaactggacttttggagcgctttccggcctaaggtgaaaaaggacatatcttcccataaaaactagacagaagcattgtcagaaacttactcgtgatgtgtgtcctcaactgacggagtagaacctttcttttgatagagcagttttgaaacactctttttgtagaatctccaagtggatatttgggtacctttgaggatttcgttggaaacgggaatatcttcatataaaacctagacagaagcattctcagaaacttccttgtgatggttgcattcaagtcacggagttgaacattggctttcatacagtaggttggaaacactctttttccattccctggaagtggacatttggagcgctttgaggcctatggtgaaaaaggaaatatcttcccataaaaactagacagaagcattctcagaaacttctttgtgatgtgtgtcctcaactgacagagttgaacatgtcttttgagagagcagttttgaaacactctttctgtggaacctgcaagtggatatttggcgggctttgacgatttcgttggaaacgggaatacatataaaaacagacagcagcgttctgagaaactacttggtgatgtttgcattcaagtcacagaatggaacgttccctttcacagaacaggtttgaaacactccttttgtcgtatctcgaagtgtccatttggagcgcattcaggcttgtgttggaaaaggaaatatcttcccataaaaatcagacagaagcattctcggcaacttgtttgtgatgtgtgccctctactaacagagtcgaacctttcttttcctagagcagttttgaaacactctttttgtagaatctgcaggagcatatttgcatatctttgaggatttcattggaaacgggattgtcttcagataaaatccagacagaagcattctcagaaacttctttgggatgtttgcattgacgtcacagaggagaacatgccctttcgtagagaaggtttgaaacactctctttgcagtatctggaagtggacacttgaagcggtttcaggcctatgttgaaaaaggaaatatcttcccgtaacaactggacagaagcattctcagaagctagtctctgatgtgtgtcctcaactaacagagttgaacatttctttggagagtatagttttgaaaaactctttttgtggagtgtgcaagtggatatttggctggatttgaggatttcgttggaaacgggataaggtataaaaagcagacagcagcattctcagcaacttctttgtgatgtttgcattcaagtcacagaattgaacattccctttcacagagcaggtttgaaacactctttttgtagtgtctgtaactggacttttggagcgctttccggcctaaggtgaaaaaggacatatcttcccataaaaactagacagaagcattgtcagaaacttactcgtgatgtgtgtcctcaactgacggagtagaacctttcttttgatagagcagttttgaaacactctttttgtagaatctccaagtggatatttgggtagctttgaggatttcgttggaaacgggaatatcttcatataaaacctagacagaagcattctcagaaacttccttgtgatggttgcattcaagtcacggagttgaacattggctttcatagagcaggttggaaacactctttttccattccctggaagtggacatttggagcgctttgaggcctatggtgaaaaaggaaatatcttcccataaaaactagacagaagcattctcagaaacttctttgtgatgtgtgtcctcaactgacagagttgaacatgtcttttgagagagcagttttgaaacactctttctgtggaacctgcaagtggatatttggcgggctttgacgatttcgttggaaacgggaatacatataaaaacagacagcagcgttctgagaaactacttggtgatgtttgcattcaagtcacagaatggaacgttccctttcacagaacaggtttgaaacactccttttgtcgtatctggaagtgtccatttggagcgcattcaggcttgtgttggaaaaggaaatatcttcccataaaaaccagacagaagccttctcggcaacttgtttgtgatgtgtgccctctactaacagagtcgaacctttctattcatagagcagttttgaaacactctttttgtagaatctgcaggagcatatttgcatatctttgaggatttcgttggaaacgggattgtcttcagataaaatccagacagaagcattctcagaaacttctttgggatgtttgcattgacgtcactgaggagaacatgccctttcgtagagaaggtttgaaacactctctttgcagtatctggaagtggacatttgaagcggtttcaggcctatgttgaaaaaggaaatatcttcccgtaacaactggacagaagcattctcagaagctagtctctgatgtgtgtcctcaactaacagagttgaacatttcttttgacagtacagttttgaaacactctttttgtggagtctgcaagtggatatttggctggatttgaggatttcgttggaaacgggataaggtataaaaagcagacagcagcattctcagcaacttctttgtgatgtttgcattcaagtcacagaattgaacattccctttcacagagcaggtttgaaacactctttttgtagtgtctgtaactggacttttggagcgctttccggcctaaggtgaaaaaggacatatcttcccataaaaactagacagaagcattgtcagaaacttactcgtgatgtgtgtcctcaactgacggagtagaacctttcttttgatagagcagttttgaaacactctttttgtagaatctccaagtggatatttggatagctttgaggatttcgttggaaacgggaatatcttcatataaaacctagacagaagcattcccagaaacttccttgtgatggttgcattcaagtcacggagttgaacattggctttcatacagtaggttggaaacactctttttccattccctggaagtggacatttggagcgctttgaggcctatggtgaaaaaggaaatatcttcccataaaaactagacagaagcattctcagaaacttctttgtgatgtgtgtcctcaactgacagagttgaacatgtcttttgagagagcagttttgaaacactctttctgtggaacctgcaagtggatatttggctggctttgacgatttcgttggaaacgggaatacatataaaaagcagacagcagcgttctgagaaactacttggtgatgtttgcattcaagtcacacaatggaacgttgcctttcatagaacagctttgaaacactccttttgtcgtatctggaagtgtccatttggagcgcattcaggcttgtgttggaaaaggaaatatcttcccataaaaaccagacagaatcattctcggcaacttgtttgggatgtgtgccctctactaacagagtcgaacctttcttttcatagagcagttttgaaacactctttttgtagaatctgcaggagcatatttgcatatctttgaggatttctttggaaacgggattgtcttcagataaaatccagacagaagcattctcagaaacttctttgggatgtttgcattgacgtcacagaggagaacatgccctttcgtagagaaggtttgaaacactctctttgcagtatctggaagtggacatttgaagcggtttcaggcctatgttgaaaaaggaaatatcttcccgtaacaactggacagaagcattctcagaagctagtctctgatgtgtgtcctcaactaacagagttgaacatttctttggagagtatagttttgaaacactctttttgtggagtctgcaagtggatatttggctggatttgaggatttcgttggaaacgggataaggtataaaaagcagacagcagcattctcagcaacttctttgtgatgtttgcattcaagtcacagaattgaacattccctttcacagagcaggtttgaaacactctttttgtagtgtctgtaactggacttttggagcgctttccggcctaaggtgaaaaaggacatatcttcccataaaaactagacagaagcattctcagaaacttactcgtggtgtgtgtcctcaactaaaggggtagaacctttcttttgatagagcagttttgaaacactctttttgtagaatctgcaagtggatatttcgatagctttgtggatttcgttggaaacgggaatatcttcatataaaatctagagagaagcattctcagaaacttccttgtgatggttgcattcatgtcacggagttgaacattggctttcatagagcaggttggaaacactctttttccattccctggaagtggacatttggagctgctttgaggcctatggtgaaaaaggaaacatcttcccataaaaactagacattagcattctcagaaacttatttgtgatgtgtgtcctcaactgacagagttgaacatttcttttgagagagcagttttgaaacacctttttgtggaatctgcaagtggatatttggctggctttgacgatttccttggcaacgtgaatacatataaaaagcagacagcaccgttctgagaaacttcttggtgatgtttgcattaaagtcacagaatggaacgttccctttcatagaacaggtttgaaacaccacttttgtcgtatctggaagtgtccatttggagcgcattcaggcttgtgttgaaaaagtttatatcttcaaataaaaactagacagaagcattctcagaaacttgtttgtgatgtgtgccctctactaacagtgttgaacctttctcttcatagagcagttttgaaacactctttttgtagaatcagcaggaggatatttgcatagatttgaagatatcgttggaaacgggattgtgttcagataaaatccagacagaagcattctcagaaacttctttgggatgtttgcattgacgtcactgaggagaacatgccctttcgtagagaaggtttgaaacactctctttgcagtatctggaagtggacatttgaagctgtttcaggcctatgttgaaaaaggaaatatcttcccgtaacaactggacagaagcattctcagaagctagtctctgatgtgtgtcctcaactaacagagttgaacatttctttggagagtatagttttgaaacactctttttgtggagtctgcaagtggatatttggctggatttgaggatttcgttggaaacgggataaggtataaaaagcagacagcagcattctcagcaacttctttgtgatgtttgcattcaagtcacagaattgaacattccctttcacatagcaggtttgaaacactctttttgtagtgtctgtaactggacttttggagcgctttccggcctaaggtgaaaaaggacatatcttcccataaaaactagacagaagcattctcagaaacttactcgtgatgtgtgtcctcaactaacggaatagaacctttcttttgatagagcagttttgaaacactctttttgtagaatctgcaagtggatatttggatagctttgaggatttcgttggaaacgggaacatcttcatataaaatctagacagaagcattctcagaaacttccttgtgatggttgcattcaagtcacggagttgaacattcgctttcatagagcaggttggaaacactctttttccattccgtggaagtggacatttggagcgctttgaggcctatggtgaaaaaggaaatatcttcccatcaaaactagacagaaacattctcagaaacttctttgtgatgtgtgtcctcaactgacagagttgaacatgtcttttgagagagcagttctgaaacactctttctgtggaacctgcaagtggatatttggctggctttgacgatttcgttggaaacgggaatacatataaaaagcagacagcagcgttctgagaaacttcttggtgatgtttgcattcaagtcacagaattgaacattccctttgatagaacaggtttgaaacactccttttctcatatctggaagtgtccattcggagcgcattcaggcttgtgttgaaaaaggatatatcttcccataacaactagacagaagcattctcagaaactagtttctgatgtgtgtcctcaactaacacagttgaacatttctttagacagaacagttttgaaacactctttttgtggaatttgcaagtggatatttggctagatttgagcatttcgttggaaacgggattacatataaaaagcagacagcggcattctcagaaagttctttgtgatgattgcattcaagtcacagaattgaacattccctttcacagagcaggtttgaaacactctttttgtagtgtgtgaaagtggacatttggagcgctttccggcctaaggtgaaaaaggaaatatcttcccataaaaactagacagaggcattctcagcaacttgtttgtgatgtgtgtcctcaaccaacggagtagaatctttcttttgatagagcagttttgaaacactctttttgtagaatctgcaagtggatatttggatagctttgaggatttcgttggaaacgggaatatcttcatataaaatctagacagaagcattctcagaaacttccttgtgatggttgcattcaagtcacggagttgaacatttgctttcatagagcaggttggaaacactctttttgcattccctggaggtggacatttggagcgctttgaggcctatggtgaaaaaggaaatatcttcccataaaaactagacagaagcattctcagaaacttttttgtgatgtgtatcctcaactgacagagttgaacatttcttttgagggagcagaattgaaacactctttttgtggaatctgcaagtggatatttggctggctttgacgatttcgttggaaacggaaatacatataaaaagcagacagcagcgttctgagaaacttcttggtgatgtttgcattcaagtcacggaatggaacgttccctttcatagaacaggtttgaaacactccttttgtcgtatctggaagtgtccatttggagcgcattaaggcttgtgttgaaaaaggaaatatcttcctataaaatacagacaaaagcattctcggcaacttgtttgtgatgtgtgccctctactaacagagtcgaacttttcttttcatagagcagttttgaaacactctttttgtagaatctgcaggagcatatttgcatatctttgaggatttcgttggaaacgggattgtcttcagataaaatccagacagaagcattctcagaaacttctttgggatgtttgcattgacgtcactgaggagaacatgccccttcgtagagaaggtttgaaacactctctttgcagtatctggaagcggacatttgaagcggtttcaggcctatgttgaaaaaggaaatatcttcccgtaacaactggacagaagcattctcagaagctagtctctgatgtgtgtcctcaactaacagagttgaacatttctttggagagtatagttttgaaacactctttttgtggagtctgcaagtggatatttggctggatttgaggatttcgttggaaacgcgataaggtataaaaagcagacagcagcattctcagcaatttctttgtgatgtttgcattcaagtcacagaattgaacattccctttcacagagcaggtttgaaacactctttttgtagtgtctgtaactggacttttggagcgctttccggcctaaggtgaaaaaggacatatcttcccataaaaactacacagaagcattgtcagaaacttactcgtgatgtgtgtcctcaactgacggagtagaacctttcttttgatagagcagttttgaaacactctttttgtagaatctccaagtggatatttggatagctttgaggatttcgttggaaacgggaatatcttcatataaaacctagacagaagaattctcagaaacttccttgtgatggttgcattcaagtcacggagttgaacattccctttcatagagcaggttggaaacattcttttagcattccctggaagtggacatttggagcgctttgaggcctatggtgaaaaaggaaatatcttctcttcaaaactagacagaagcattctcagaaacttatttgtgatgtatgtcctcaactaacagattagaacatttcttttgagagagcagttttgaaacactctttttgtggaatctgcaagtggatatttggctggctttgatgatttcgttggacacggaaatacatataaaaagcagacagcagcgttctgagaaactttttggtgatgtttgcattcaagtcacaaaactgaacattccctttgatacaacatgtttgaaacactccttttgtcatatctggaagtgtccatttggagcgcattcaggcttgtgttgaaaaaggaaatatcttcccataacaactagacagaagcattctcagaaactagtttctgatgtgtgtcctcaactaacacagttgtacatttctttagacagaacagttttgaaacattctttttgtggaatctgcaagtggatatttggctagatttgagcatttcgttggaaacgggattacatacaaaaagcagacagcggcattctcagaaagttctttgtgatgattgcattcaagtcacagaattgaacattccctttcacagagcaggtttgaaacactctttttgtagtgtgtgaaagtggacatttggagcgctttccggcctaaggtgaaaaaggaaatatcttcccataaaaactagacagaagcattgtcagaaacttactcgtgatgtgtgtcctcaactgacggagtagaacctttcttttgatagagcagttttgaaacactctttttgtagaatctccaagtggatatttggatagctttgaggatttcgttggaaacgggaatatcttcatataaaacctagacagaagtattatcagaaacttcccttgtgatggttgcattcaagtcacagagttgaacattcgctttcatagagcatgtttgaaacactctttttccattacctggaagtggacatttggagcgctttgaggcctatggtgaaaaaggaaatatcttcccaaaaaaactagacagaagcattctcagaaacttatttgtgatgtgtgtcctcacctgacagagttgaacatttcttttgagagagcagttttgaaacactctttttgtggaatctgcaaggggatattcggctggctttgacgatttcgttggaaacgggaatacatataaaaagcagacagcagcgttctgagaaacttcttggtgatgtttgcattcaagtcactgaatggaaagttccctttcatagaacaggtttgaaacactctttttgtcgtatctggaagtgtccatttggagcgcattcaggcttgtgttgaaaaaggaaatatcttcccataaaaactagacagaagcattctcagaaactagtttctgatgtgtgtcctcaactaacacagttgaacatttctttagacagaacagttttgaaacactctttttgtggaatttgcaagtggatatttggctagatttgagcatttcgttggaaacgggattacatataaaaagcagacagcagcattctcagaaacttcgttgtgatgtttgcattcaagtctcagaattgaacattccctttcacagagcaggtttgaaacactctttttgtagtgtctgtaactggacttttggagcgcttcgaggcctatggtgaaaaaggaaatatcttcccataaaacctagacataagcattctcagaaacttatttgttatgtgtgtcctcaactaacagatttgaacatttcttttgagagagcaattttgaaacactctttttgtagaatctgcaaatggatatttggatagctttgaggatttcgttggaaacgggaatatcttcatataaaatctagacagaagcattctcagaaacttccttgtgatggttgcattcaagtcacggagttgaacattcactttcatagagcaggttggaaacactctttttccattatctggaagtggacatttggagcgctttgaggcctatggtgaaaaaggaaatctattcccataaaaattagacagaagcattctcagaaacttatttgtgatgtgtgtcctcaactgacagagttgaacatttcttttgagagagcagatttgaaacactctttttgtggaatctgcaagtggatatttggtggctttgacgatttcgttggaaacgggattacatataaaaagcagacagcagcgttctgagaaacttcttggtgatgtttgcattcaagtcacagaattgaacattccctttgatagaacaggtttgaaacactccttttctcatatctggaagtgtccattcggagcgcattcaggcttgtgttgaaaaaggatatatcttcccataacaactagacagaagcattctcagaaactagattctgatgtgtgtcctcaactaacacagttgaacatttctttagacagaacagttttgaaacactctttttgtggaatttgcaagtggatatttggctagatttgagcatttcgttggaaacgggattacatataaaaagcagacagcggcattctcagaaagttctttgtgatgattgcattcaagtcacagaattgaacattccctttcacagagcagatttgaaacactctttttgtagtgtgtgtaagtggacatttggagcgctttccggcctaaggtgaaaaaggaaatatcttcccataaaaactagacagaagcattctcagaaacttactcgtgatatgtgacctgaactaatggagtagaagctttcttttgatagagcagttttgaaacactctttttgtaggatctgcaagtggatatttggatagctttgaggatttcgttggaaacgggaatatcttcatataaaatctagacagaagcattctcagaaacttccttgtgatggttgcattcaagtcacggagttgaacattcgctttcatagagcaggatggaaacactctttttccattccctggaagtggacatttggagcgcttcgaggcctatggtgaaaaaggaaatattttcccctcaaaactagacagaagcattctcagaaacttatttgtgatgtgtgtcctcaactaacagatttgaacatttcttttgagagagcagttttgaaacactctttttgtggaacctgcaagtggatatttggctggctttgacgatttcgttggaaacgggaatacatataaaaagcagacagcagcgttctgagaaactacttggtgatgtttgcattcaagtcacagaacggaacgttccctttcacagaacaggtttgaaactctccttttgtcgtatctggaagtgtccatttggatcgcattcaggcttgtgttgaaaaaggaaatatcttcccataaaaactagacagaagcattctcagcaacttgtttgtgatgtgtgacctctactaacagagttgaacctttcttttcatacagcagttttgaaacactctgtttgtagaacctgcaggaggatatttgcatagctttgaggatttcgttggaaacgggattgtcttcagataaaatccagacagaagcattctcagaaacttctttgggatgtttgcagacaagtcacagaggagaacatgccctttcttagagaaggtttgaaacactctctttgtagtatctgaaagtggacatttggagcggtttcaggcctatgttgaaaaaggaaatatcttcccttaacaactagaaagaagcattctcagaagctagtctctgatgtgtgtcctcaactaacagagttgaacatttctttagacagaacagttttgaaacactctttttgtggagtctgcaagtggatatttggctagatttttaggatttcgttggaaacgggattacgtataaaaagccgacagcagcattctcagcaatttctttgtgatgtttgcattcaagtcacagaattgaacattccctttcacagagcaggtttgaaacactctttttgtagtgtctgtaactggacttttggagcgctttccggcctaaggtgaaaaaggacatatcttcccataaaaactagacagaagcattgtcagaaacttactcgtgatgtgtgtcctcaactgacggagtagaacctttcttttgatagagcagttttgaaacactctttttgtagaatctccaagtggatatttggatagctttgaggatttcgttggaaacgggaatatcttcatataaaacctagacagaagcattctcagaaacttccttgtgatggttgcattcaagtcacggagttgaacattggcattcatagagcaggttggaaacactctttttccattccctggaagtggacatttggagcgctttgaggcctatggtgaaaaaggaaatatcttcccataaaaactagacagaagcattctcagaaacttcattgtgatgtgtgtcctcaactgacagagttgaacatgtcttttgagagagcagttttgaaacactctttctgtggaacctgcaagtggatatttagctggtttgacgatttcgttggaaacgggaatacatataaaaagcagacagctgcgttctgagaaactacttggtgatgtttgcattcaagtcacagaatggaacgttccctttcacagaacaggtttgaaacactccttttgtcgtatctggaagtgtccatttggagcgcattcaggcttgtgttggaaaaggaaatatcttcccaaaaaaatcagacagaagcattctcggcaacttgtttgtgatgtgtgccctctactaacagagtcgaacttttcttttcatagagcagttttgaaacactctttttgtagaatctgcaggagcatatttgcatatctttgaggatttcgttggaaacgggattgtcttcagataaaatccagacagaagcattctcagaaacttctttgggatgtttgcattgacgtcacagaggagaacatgccctttcgtagagaaggtttgaaacactctctttgcagtatctggaagtggacatttgaagcggtttcaggcctatgttgaaaaaggaaatatcttcccgtaacaactggacagaagcattctcagaagctagtctctgatgtgtgtcctcaactaacagagttgaacatttctttggagagtatagttttgaaacactctttttgtggagtctgcaagtggatatttggctggatttgaggatttcgttggaaacgggataaggtataaaaagcagacagcagcgttctgagaaacatctttgtgatgttagtattcaggacacagagttgaacattccctatcatagagcaggtttgaatcactccttttgtagtatctggaagtggacatttggagcgctttccggcctcaggtgaaaaaggaaatatcttcccataaaaactagacagaagcattctcagaaacttactcgtgatgtgtgtcctcaactaacggagtagaacctttcttttgatagagcagttttgaaacactctttttgtagaatctgcaagtggatattttgatagctttgaggatttcgttggaaacgggaagatcttcatataaaatctagacagaagcattctcagaaacttccttgtgatggttgcattcaagtcacggagttgaacattggctttcatagagcaggttggaaacactctttttccattccctggaagtggacatttggagcgctttgaggcctatggtgaaaaaggaaatatcttcccataaaaactagacagaagcattctcagaaacttctttgtgatgtgtgtcctcaactgacagagttgaacatgtcttttgagagagcagttttgaaacactctttctgtggaacctgcaagtggatatttggcgggctttgacgatttcgttggaaacgggaatacatataaaaacagacagcagcgttctgagaaacttcttggtgatgtttgcattcaagtcacggaatggaacgttccctttcatagaacaggtttgaaacactccttttgtcgtatctggaagtgtccctttggagcgcattcaggcttgtgttgaaaaaggaaatatcttcccataaaaactagacagaagcattctcagcaacttgtttgtgctgtgtgccctctactaagagaggtgaacctttcttttcatagagcagttttgaaacactctgtttgtagagtctgcagttgaatatttgcatagatttgaggatttctttggaaacgggattgtcttcacataaaatccagacagaagcattctcagcaacttctttgggagatttgcatacaagtcacagaggagaacatgccctttcgtagagaaggtttgaaacactctttttgtagtatctggaagtggacatttggagcggtttcaagattatgttgaaaaaggaaatatcttcccgtaacaactggacagaagaattctcaggagctagtctctgatgtgtgtcctcaactaagagagttgaacatttctttagacagaactgttttgaaactctctttttgtggagtctgcaagtggatatttggctagatttgaggatttcgttggaaacgggattacgtataaaaagcagacagcagcattctcagaaacttcgttgtgatgtttgcattcaagtctcagaattgaacattccctttcacagagcaggtttgaaacactctttttgtagtgtctgtaactggacttttggagcgcttcgaggcctatggtgaaaaaggaaatatcttcccataaaacctagacataagcattctcagaaatttactcgagatgtgtgtcctcaactgacggagtagaacctttcttttgatagagcagttttgaaacactctttttgtagaatctccaagtggatatttggatagctttgaggatttcgttggaaacgggaatatcttcatataaaatctagacagaagcattctcagaaacttccttgtgatggttgcattcaactcacggagttgaacattggctttcatagagcaggttggaaacactctttttccattccctggaagtggacatttggagcgctttgaggcctatggtgaaaaaggaaatatcttcccataaaaactagacagaagcattctcagaaacttatttgtgatgtgtgtcctcaactgacagagttgaacatttcttttgagagagcagttttgaaacactctttttgtggaatctgcaagtggatatttggctggctttgaggatttcgttggaaacgggaatacatataaaaagcagacagcagcgttctgagaaacttcttggtgatgtttgcattcaagtcacagaattgaacattccctttgatagaacaggtttgaaagactccttttctcatatctggaagtgtccattcggagcgcattcaggcttgtgttgaaaaaggatatatcttcccataacaactagacagaagcattctcagaaactagtttctgatgtgtgtcctcaactaacacagttgaacatttctttagacagaacagttttgaaacactctttttgtggaatttgcaagtggatatttggctagatttgagcatttcgttggaaacgggattacatataaaaagcagacagcagcattctcagcaacttctttgtgatctttgcattcaagttacagaattgaacattccctttcacagagcaggtttgaaacactctttttgtagtgtctgtaactggacttttggagcgctttccggcctaaggtgaaaaaggacatatcttcccataaaaactagacagaagcattgtcagaaacttactcgtgatgtgtgtcctcaactgacggagtagaacctttcttttgatagagcagttttgaaacactctttttgtagaatctccaagtggatatttggatagctttgaggatttcgttggaaacgggaatatcttcatataaaacctagacagaagcattctcagaaacttccttgtgatggttgcattcaagtcacggagttgaacattggctttcatacagtaggttggaaacactctttttccattccctggaagtggacatttggagcgctttgaggactatggtgaaaaaggaaatatcttcccataaaaactagacagaagcattctcagaaacttctttgtgatgtgtgtcctcaactgacagagttgaacatgtcttttgagaaagcagttttgaaacaatctttctgtggaacctgcaagtggatatttggctggctttgacgatttcgttggaaacgggaatacatataaaaagcagacagcagcgttctgagaaacttcttggtgatgtttgcattcaagtcactgaatggaaagttccctttcatagaacaggtttgaaactctccttttgtcgtaactggaagtgtccatttcgagcgcattcaggcttgtgttgaaaaaggaaatatcttcccataaaaactagacagaagccttctcggcaacttgtttgtgatgtgtgccctctactaacagagtcgaacctttctattcatagagcagttttgaaacactctttttgtagaatctgcaggagcatatttgcatagctttgaggatttcgttggaaacgggattgtcttcagataaaatccagacagaagcattctcagaaacttctttgggatgtttgcattgacgtcactgaggagaacatgccccttcgtagagaaggtttgaaacactctctttgcagtatctggaagcggacatttgaagctgtttcaggcctatgttgaaaaaggaaatatcttcccgtaacaactggacagaagcattctcagaagctagtctctgatgtgtgtcctcaactaacagagttgaacatttctttggagagtatagttttgaaacactctttttgtggagtctgcaagtggatatttggctggatttgaggatttcgttggaaacgcgataaggtataaaaagcagacagcagcgttctgagaaacatctttgtgatgtttgtattcaggacacagagttgaacgttccctatcatagagcaggtttgaatcactccttttgtagtatctggaagtggacatttggagcgctttccggcctcaggtgaaaaaggaaatatcttcccataaaaactagacagaagcattctcagaaacttactcgtgatgtgtgtcctcaactaaaggggtagaacctttcttttgatagagcagttttgaaacactctttttgtagaatctgcaagtggatatttcgatagctttgtggatttcgttggaaacgggaatatcttcatataaaatctagagagaagtattatcagaaacttccttgtgatggttgcattcaagtcacagagttgaacattcgctttcatagagcatgtttgaaacactctttttccattacctggaagtggacttttggagcgctttgaggcctatggtgaaaaaggaaatatcttcccaaaaaaactagacagaagcattctcagaaacttatttgtgatgtgtgtcctcaactgacagagttgaacatttcttttgagagagcagttttgaaacactctttttgtggaatctgcaagtggatatttggctggctttgaggatttcgttggaaacgggaatacatataaaaagcagacagcagcgttctgagaaacttcttggtgatgtttgcattcaagtcacagaattgaacattccctttgatagaacaggtttgaaacactccttttgtcatatctggaagtgtccatttggagcgcattcaggcttgtgttgaaaaaggaaatatcttcccataacaactagacagaagcattctcagaaactagtttctgatgtgtgtcctcaactaacacagttgaacatttctttagacagaacagttttgaaacactctttttgtggaatttgcaagtggatatttggctagatttgagcatttcgttggaaacgggattacatataaaaagcagacagcagcattctcagcaatttctttgtgatgtttgcattcaagtcacagaattgaacattccctttcacagagcaggtttgaaacactctttttgtagtgtctgtaactggacttttggagcgctttccggcctaaggtgaaaaaggacatatcttcccataaaaactagacagaagcattgtcagaaacttactcgtgatgtgtgtcctcaactgacggagtagaacctttcttttgatagagcagttttgaaacactctttttgtagaatctccaagtggatatttggatagctttgaggatttcgttggaaacgggaatatcttcatataaaacctagacagaagtattatcagaaacttccttgtgatggttgcattcaagtcacagagttgaacattcgctttcatagagcatgtttgaaacactctttttccattacctggaagtggatatttggagcgctttgaggcctatggtgaaaaaggaaatatcttcccaaaaaaactagacagaagcattctcagaaacttatttgtgatgtgtgtcctcaactgacagagttgaacatttcttttgagagagcagttttgaaacactctttttgtggaatctgcaagtggatatttggctggctttgaggatttcgttggaaaagggaatacatataaaaagcagacagcagcgttctgagaaacttcttggtgatgtttgcattcaagtcacagaattgaacattccctttgatagaacaggtttgaaacactccttttctcatatctggaagtgtccatttggagcgcattcaggcttgtgttgaaaaaggaaatatcttcccataacaactagacagaagcattctcagcaacttgtttgtgatgtgtgccctctactaacagagttgaacctttcttttcatagagcagttttgaaacactctttttgtagaatctgcaggaggatatttgcatagctttgaggatttcgttggaaacgggattgtcttcagataaaatccagacagaagcattctcagaaacttcgctgggatgtttccattcaagtcacagaggagaacatgccctttcgtagagaaggtttaaaacactctttttgtagtatctggaagtggacatttggagcagtttcaggcctatgttgaaaaaggaaatatcttcccttaacaactggacagaagtattctcagaagctagtctctgatgtgtgtcctcaactaacagagttgaacatttctttagacagaacagttttgaaaccctctttttgtggagtctgcaagtggatatttggctagatttttaggatttcgttggaaacgggattacgtataaaaagccgacagcagcattctcagaaacttctttgtgatgtttgcattcaagtcacagaattgaacattacctttgatagagcagttttgtaacactcttttggtagtgtctgtaagtggacatctggatcgctttccggcctaaggtgaaaaaggacatatcttcccataaaaaccagacagaagcattctcagaaacttactcgtgatgtgtgtcctcaactaacggagtagaacctttcttttgatagagcagatttgagaacacactttttgtagaatctgcaagtggatatttggatagctttgaggatttcattggaaacgggaatatcttcatataaaatctagacagaagcattctcagaaacttccttgtgatggttgcattcaattcacagagttgagcattcgctttcatagagcaggttggaaatactcattttccattccctggaagtggacatttggagcgcttcgaggcctatggtgaaaaaggaaacatcttcccataaaaactagacattagcattctcagaaacttctttgtgatgtgtgtcctcaactgacagagttgaacatgtcttttgagagagcagttttgaaacactctttctgtggaacctgcaagtggatatttggctggctttgacgatttcgttggaaacgggaatacatataaaaagcagacagcagcgttctgagaaactttttggtgatgtttgcattcaagtcacaaaactgaacattccctttgatacaacaggtttgagacactccttttgtcatatctggaagtgtccatttggagcgcattcaggcttgtgttgaaaaaggaaatatcttcccataacaactagacagaagcattctcggcaacttgtttgtgatgtgtgccctctactaacagagtcgaacttttcttttcatagagcagttttgaaacactctttttgtagaatctgcaggagcatatttgcatatctttgaggatttcgttggaaacgggattgtcttcagataaaatccagacagaagcattctcagaaacctctttgggatgtttgcattcaagtcacagaggagaacatgccgtttcgtagagaaggtttgaaacactctttttgtagtatctggaagtggacatttggagcggtttcaggcctatgttgaaaaaggaaatatcttcccgtaacaactggacagaagcattctcagaagctagtctctgatgtgtgtcctcaactaacagagttgaacatttcttttgacagtacagttttgaaacactctttttgtggagtctgcaagtggatatttggctggatttgaggatttcgttggaaacgggataaggtataaaaagcagacagcagcattctcagcaacttctttgtgatgtttgcattcaagtcacagaattgaacattccctttcacatagcaggtttgaaacactctttttgtagtgtctgtaactggacttttggagcgctttccggcctaaggtgaaaaaggacatatcttcccataaaaactagacagaagcattgtcagaaacttactcacgatgtgtgtcctcaactaagggagtagaacctttcttttgatagagcagttttgaaacactctttttgtagaatctcaaagcggatatttggatagatttgaggatttcgttggaaacgggaatatcttcatataaaatctagacagaagcattctcagaaacttccttgtgatgtttgcattcaagtcacggagttgaacattcgctttcatagagcaggttggaaacactctttttccattccctggaagtggacatgtggagcggtttgaggcctatggtgaaaaaggaaatatcttcccataaaaactagacagaagcattctcagaaacttatttgtgatgtgtgtcctcaactgacagagttgaacatttcttttgagagagcagttttgaaacactctttttgtggaatctgcaagtggatatttggctggctttgaggatttcgttggaaacgggaatacatataaaaagcagacagcagcgttctgagaaactttttggtgatgtttgcattcaagtcacaaaactgaacattccctttgatacaacaggtttgagacactccttttgtcatatctggaagtgtccatttggagcgcattcaggcttgtgttgaaaaaggaaatatcttcccataacaactagacagaagcattctcggcaacttgtttgtgatgtgtgccctctactaacagagtcgaacctttctattcatagagcagtttggaaacactctttttgtagaatctgcaggagcatatttgcatatctttgaggatttcgttggaaacgggattgtcttcagataaaatccagacagaagcattctcagaaacttctttgggatgtttgcattgacgtcactgaggagaacatgccctttcgtagagaaggtttgaaacactctctttgcagtatctggaagtggacatttgaagcggtttcaggcctatgttgaaaaaggaaatatcttcccgtaacaactggacagaagcattctcagaagctagtctctgatgtgtgtcctcaactaacagagttgaacatttcttttgacagtacagttttgaaacactctttttgtgcagtctgcaagtggatatttggctggatttgaggatttcgttggaaacgggataaggtataaaaagcagatagcagcattctcagcaatttctttgtgatgtttgcattcaagtcacagaattgaacattccctttcacagagcaggtttgaaacactctttttgtagtgtctgtaactggacttttggagcgctttccggcctcaggtgaaaaaggacatatcttcccataaaaactagacagaagcattctcagaaacttactcgtgatgtgtgtcctcaactaaaggggtagaacctttcttttgatagagcagttttgaaacactctttttgtagaatctgcaagtggatatttcgatagctttgtggatttcgttggaaacgggaatatcttcatataaaatctagaaagaagcattatcagaaacttccttgtgatggttgcattcaagtcacagagttgaacattcgctttcatagagcatgtttgaaacactctttttccattacctggaagtggacatttggagcactttgaggcctatggtgaaaaaggaaatatcttcccaaaaaaactagacagaagcattctcagaaacttatttgtgatgtgtgtcctcaactgacagagttgaacatttcttttgagagagcagttttgaaacactctttttgtggaatctgcaagtggatatttggctggctttgaggatttcgttggaaacgggaatacatataaaaagcagacagcagcgttctgagaaacttcttggtgatgtttgcattcaagtcacagaattgaacattccctttaatagaacaggtttgaaacactccttttgtcatatctggaagtgtccctttggagcgcattcaggcttgtgttgaaaaaggaaatatcttcccataacaactagacagaagccttctcggcaacttgtttgtgatgtgtgccctctactaacagagtcgaacctttctattcatagagcagttttgaaacactccttttgtagaatctgaaggagcatatttgcatatctttgaggatttctttggaaacgggattgtcttcagataaaatccagacagaagcattctcagaaacttctttgggatgtttgcattgacgtcactgaggagaacatgccctttcgtagagaaggtttgaaacactctctttgtagtatctggaagtggacatttgaagtggtttcaggcctatgttgaaaaaggaaatatcttcccgtaacaactggacagaagcattctcagaagctagtctctgatgtgtgtcctcaactaacagagttgaacatttcttttgacagtacagttttgaaacactctttttgtggagtctgcaagtggatatttggctggatttgaggatttcgttggaaacgggataaggtataaaaagcagacagcagcattctcagcaacttctttgtgatgtttgcattcaagtcacagaattgaacattccctttcacagagcaggtttgaaacactctttttgtagtgtctgtaactggacttttggagcgctttccggcctaaggtgaaaaaggacatatcttcccataaaaactagacagaagcattgtcagaaacttactcgtgatgtgtgtcctcaactgacggagtagaacctttcttttgatagagcagttttgaaacactctttttgtagaatctccaagtggatatttggatagctttgaggatttcgttggaaacgggaatatcttcatataaaacctagacagaagtattatcagaaacttccttgtgatggttgcattcaagtcacagtagttgaacattcgctttcatagagcatgtttgaaacactctttttccattacctggaagtggacttttggagcgctttgaggcctatggtgaaaaaggaaatatcttcccaaaaaaactagacagaagcattctcagaaacttctttgtgatgtgtgtcctcaactgacagagttgaacatgtcttttgagagagcagttctgaaacactctttctgtggaacctgcaagtggatatttggctggctttgacgatttcgttggaaacgggaatacatataaaaagcagacagcagcgttatgagaaactacttgttgatgtttgcattcaagtcacagcaatggaacgttccctttcatagaacaggtttgaaacactccttttgtcgtatctggaagtgtccatttggatcgcattcaggcttgtgttgaaaaaggaaatatcttcccataaaaactagacagaagcattctcagcaacttgtttgtgatgtgtgacctctactaacagagttgaacctttcttttcatacagcagttttgaaacactctttttgtagaacctgcaggaggatatttgcatagctttgaggatttcgttggaaacgggattgtcttcagataaaatccagacagaagcattctcagaaagttctttgggatgtttgcattgacgtcacagaggagaacatgccctttcgtagagaaggtttgaaacactctctttgcagtatctggaagtggacatttgaagcggtttcaggcctatgttgaaaaaggaaatatcttcccgtaacaactggacagaagcattctcagaagctagtctctgatgtgtgtcctcaactaacagagttgaacatttcttttgacagtacagttttgaaacactctttttgtggagtctgcaagtggatatttggctggatttgaggatttcgttggaaacgggataaggtataaaaagcagacagcggcattctcagaaagttctttgtgatgattgcattcaagtcacagaattgaacattccctttcacagagcagatatgaaacactctttttgtagtgtgtgtaagtggacatttggagcgctttccggcctaaggtgaaaaaggaaatatcttcccataaaaactagacagaagcattgtcagaaacttactcgtgatgtgtgtcctcaactgacggagtagaacctttcttttgatagagcagttttgaaacactctttttgtagaatctccaagtggatatttgggtagctttgaggatttcgttggaaacgggaatatcttcatataaaacctagacagaagcattatcagaaacttccttgtgatggttgcattcaagtcacagagttgaacattcgctttcatagagcatgtttgaaacactctttttccattacctggaagtggacatttggagcgctttgaggcctatggtgaaaaaggaaatatcttcccaaaaatctagacagaagcattctcagaaacttatttgtgatgtgtgtcctcaactgacagagttgaacatttcttttgagagagcagttttgaaacactctttttgtggaatctgcaagtggatatttggctggctttgaggatttcgttggaaacgggaatacatataaaaagcagacagcagcgttctgagaaactttttggtgatgtttgcattcaagtcacaaaactgaacattccctttgatacaacatgtttgaaacactccttttgtcatatctggaagtgtccatttggagcgcattcaggcttgtgttgaaaaaggaaatatcttcccataacaactagacagaagcattctcggcaacttgtttgtgatgtgtgccctctactaacagagtcgaacttttcttttcatagagcagttttgaaacactctttttgtagaatctgcaggagcatatttgcatatctttgaggatttcgttggaaacgggattgtcttcagataaaatccagacagaagcattctcagaaacttcttcgggatgtttgcattcaagtcacagaggagaacatgccctttcgtagagaaggtttgaaacactctttttatagtatctggaagtggacatatggagcagtttcaagacaatgttgaaaaaggaaatatcttctcgtaacaactggacagaagcatactcagaagctagtctttcatgtgtgccctcacctaacagagttcaacatttctttagacagaacagttttgaaacactctttttgtgcagtctgtaagtggatatttggctagatttgaggatttcgttggaaacgggattacgtataaaaagcagacaggagcattctcagaaacttctttgtgatgtttgcattcaagtcacagaattgaacattccctttcacagagcagttttgaaacactctttttgtagtgtctgtaagtggacgtttggagcgctttctggcctaaggtgaaaaaggacatatcttcccataaaaactagacagaagcattctcagaaacttatttgtgatgtgtgtcctcaactgacagagttgaacattacttttgagagagcagttttgaaacactctttttgtggaatctgcaagtggatatttggctggctttgaggatttcgttggaaacgcgaatacatataaaaagcagacagcagcgttctgagaaacttcttggtgatgtttgcattcaagtcacagaattgaacattccctttaatagaacaggtttgaaacactccttttgtcatatctggaagtgtccatttggagcgcattcaggcttgtgttgaaaaaggaaatatcttcccataacaactagacagaagccttctcggcaacttgtttgtgatgtgtgccctctactaacagagtcgaacctttctattcatagagcagttttgaaacactctttttgtagaatctgcaggagcatatttggatagctttgaggatttcgttggaaacgggattgtcttcagataaaatccagacagaagcattctcagaaacttctttgggatgtttgcattgacgtcacagaggagaacatgccctttcgtagagaaggtttgaaacactctctttgcagtatctggaagtggacatttgaagcggtttcaggcctatgttgaaaaaggaaatatcttcccgtaacaactggacagaagcattctcagaagctagtctctgatgtgtgtcctcaactaacagagttgaacatttctttggagagtatagttttgaaacactctttttgtggagtctgcaagtggatatttggctggatttgaggatttcgttggaaacgcgataaggtataaaaagcagacagcagcattctcagcaatttctttgtgatgtttgcattcaagtcacagaattgaacattccctttcacagagcaggtttgaaacactctttttgtagtgtctgtaactggacttttggagcgctttccggcctaaggtgaaaaaggacatatcttcccataaaaactagacagaagcattctcagaaacttactcgtgatgtgtgtcctcaactaaaggggtagaacctttcttttgatagagcagttttgaaacactctttttgtagaatctgcaagtggatatttcgatagctttgtggatttcgttggaaacgggaatatcttcatataaaatctagagagaagtattatcagaaacttccttgtgatggttgcattcaagtcacagagttaaacattcgctttcatagagcatgtttgaaacactctttttccattacctggaagtggacttttggagcgctttgaggcctatggtgaaaaaggaaatatcttcccaaaaaaactagacagaagcattctcagaaacttatttgtgatgtgtgtcctcaactgacagagttgaacatttcttttgagagagcagttttgaaacactctttttgtggaatctgcaagtggatatttggctggctttgaggatttcgttggaaacgggaatacatataaaaagcagacagcagcgttctgagaaacttcttggtgatgtttgcattcaagtcacagaattgaacattccctttgatagaacagggttgaaacactccttttgtcatatctggaagtgtccatttggagcgcattcaggcttgtgttgaaaaaggaaatatcttcccatagcaactagacagaagcattctcagaaactagtttctgatgtgtgtcctcagctaacacagttgaacatttctttagacagaacagttttgaaacactctttttgtggaatctgcaagtggatatttggctagatttgagcatttcgttggaaacgggattacatataaaaagcacacagcagcgttctgagaaacatatttgtgatgtttgtattcaggacacagagttgaacattccctatcatagagcaggtttgaatcactccttttgtagtatctggaagtgaacatttggagcgctttccggcctcaggtgaaaaaggaaatatcttcccataaaaactagacagaagcattgtcagaaacttactcgtgatgtgtgtcctcaactgacggagtagaacctttcttttgatagagcagttttgaaacactctttttgtagaatctccaagtggatatttggatagctttgaggatttcgttggaaacgggaatatcttcatataaaacctagacagaagtattatcagaaacttccttgtgatggttgcattcaagtcacagagttgaacattcgctttcatagagcatgtttgaaacactctttttccattacctggaagtggacttttggagcgctttgaggcctatggtgaaaaaggaaatatcttcccaaaaaaactagacagaagcattctcagaaacttatttgtgatgtgtgtcctcaactgagagagttgaacatttcttttgagagagcagttttgaaacagtctttttgtggaatctgcaagtggatatttggctgactttgaggatttcgttggaaacgggaatacatatacaaagcagacagcagcgttctgagaaacttcttggtgatgtttgcattcaagtcacagaattgaacattccctttgatagaacaggtttgaaacactccttttctcatatctggaagtgtccattcggagcgcattcaggcttgtgttgaaaaaggatatatcttcccataacaactagacagaagcattctcagaaactagattctgatgtgtgtcctcaactaacacagttgaacatttctttagacagaacagttttgaaacactctttttgtggaatttgcaagtggatatttggctagatttgagcatttcgttggaaacgggattacatataaaaagcagacagcggcattctcagaaagttctttgtgatgattgcattcaagtcacagaattgaacattccctttcacagagcagatatgaaacactctttttgtagtgtgtgtaagtggacatttggagcgctttccggcctaaggtgaaaaaggaaatatcttcccataaaaactagacagaagcattgtcagaaacttactcgtgatgtgtgtcctcaactgacggagtagaacctttcttttgatagagcagttttgaaacactctttttgtagaatctccaagtggatatttggatagctttgaggatttcgttggaaacgggaatatcttcatataaaacctagacagaagcattctcagaaacttccttgtgatggttgcattcaagtcacggagttgaacattggctttcatagagcaggttggaaacactctttttccattccctggaagtggacatttggagcgctttgaggcctatggtgaaaaaggaaatatcttcccataaaaactagacagaagcattctcagaaacttctttgtgatgtgtgtcctcaactgacagagttgaacatgtcttttcagagagcagttctgaaacactctttctgtggaacctgcaagtggatatttggctggctttgacgatttcgtaggaaacgggaatacatataaaaagcagacagctgcgttctgagaaactacttggtgatgtttgcattcaagtcacagaatggaacgttccctttcacagaacaggtttgaaacactccttttgtcgtatctggaagtgtccatttggagcgcattcaggcttgtgttggaaaaggaaatatcttcccaaaaaaatcagacagaagcattctcggcaacttgtttgtgatgtgtgccctctactaacagagtcgaacttttcttttcatagagcagttttgaaacactctttttgtagaatctgcaggagcatatttgcatatctttgaggatttcgttggaaacgggattgtcttcagataaaatccagacagaagcattctcagaaacttctttgggatgtttgcattgacgtcacagaggagaacatgccctttcgtagagaaggtttgaaacactctctttgcagtatctggaagtggacacttgaagcggtttcaggcctatgttgaaaaaggaaatatcttcccgtaacaactggacagaagcattctcagaaactattttctgatgtgtgtcctcaactaacacagttgaacttttctttagacagaacagttttgaaacactctttttgtggaatctgcaagtggatattgggctagatttgaggatttcgttggaaacgggattacatataaaaagcagacagcagcattctcagcaatttctttgtgatgtttgcattcaagtcacagaattgaacattccctttcacagagcaggtttgaaacacgctttttgtagtgtctgtaactggacttttggagcgctttccggcctaaggtgaaaaaggacatatcttcccataaaaactagacagaagcattgtcagaaacttactcgtgatgtgtgtcctcaactgacggagtagaacctttcttttgatagagcagttttgaaacactctttttgtagaatctccaagtggatatttggatagctttgaggatttcgttggaaacgggaatatattcatataaaacctagacagaagcattctcagaaacttccttgtgatggttgcattcatgtcacggagttgaacattggctttcatagagcaggttggaaacactctttttccattccctggaagtggacatttggagcgctttgaggcctatggtgaaaaaggaaacatcttcccataaaaactagacagaagcattctcagaaacttctttgtgatgtgtgtcctcaactgacagagttgaacatgtcttttgagagagcagttttgaaacactctttctgtggaacctgcaagtggatatttggcgggctttgacgatttcgttggaaacgggaatacatataaaaacagacagctgcgttctgagaaactacttggtgatgtttgcattcaagtcacagtaatggaacgttccctttcacagaacaggtttgaaacactccttttgtcgtatctggaagtgtccatttggagcgcattcaggcttgtgttggaaaaggaaatatcttcccaaaaaaatcagacagaagcattctcggcaacttgtttgtgatgtgtgccctctactaacagagtcgaacttttcttttcatagagcagttttgaaacactctatttgtagaatctgcaggagcatatttgcatatctttgaggatttcgttggaaacgggattgtcttcagataaaatccagacagaagcattctcagaaacttcttcgggatgtttgcattcaagtcacagaggagaacatgccctttcgtagagaaggtttgaaacactctttttatagtatctggaagtggacatatggagcagtttcaagacaatgttgaaaaaggaaatatcttctcgtaacaactggacagaagcattctcagaagctagtctctgatgtgtgtcctcaactaacagagttgaacatttctttggagagtatagttttgaaacactctttttgtggagtctgcaagtggatatttggctggatttgaggatttcgttggaaacgggataaggtataaaaagcagacagcagcattctcagcaacttctttgtgatctttgcattcaagttacagaattgaacattccctttcacagagcaggtttgaaacactctttttgtagtgtctgtaactggacttttggagcgctttccggcctaaggtgaaaaaggacatatcttcccataaaaactagacagaagcattgtcagaaacttactcgtgatgtgtgtcctcaactgacggagtagaacctttcttttgatagagcagttttgaaacactctttttgtagaatctccaagtggatatttggatagctttgaggatttcgttggaaacgggaatatcttcatataaaacctagacagaagcattctcagaaacttccttgtgatggttgcattcaagtcacggagttgaacattggctttcatacagtaggttggaaacactctttttccattccctggaagtggacatttggagcgctttgaggactatggtgaaaaaggaaatatcttcccataaaaactagacagaagcattctcagaaacttcattgtgatgtgtgtcctcaactgacagagttgaacatgtcttttgagagagcagttttgaaacactctttctgtggaacctgcaagtggatatttagctggtttgacgatttcgttggaaacgggaatacatataaaaagcagacagctgcgttctgagaaactacttggtgatgtttgcattcaagtcacagaatggaacgttccctttcacagaacaggtttgaaacactccttttgtcgtatctggaagtgtccatttggagcgcattcaggcttgtgttggaaaaggaaatatcttcccaaaaaaatcagacagaagcattctcggcaacttgtttgtgatgtgtgccctctactaacagagtcgaacttttcttttcatagagcagttttgaaacactctttttgtagaatctgcaggagcatatttgcatatctttgaggatttcgttggaaacgggattgtcttcagataaaatccagacagaagcattctcagaaacttctttgggatgtttgcattgacgtcacagaggagaacatgccctttcgtagagaaggtttgaaacactccctttgcagtatctggaagcggacatttgaagcggtttcaggcctatttagaaaaaggaaatatcttcccgtaacaactggacagaagcattctcagaagctagtctctgatgtgtgtcctcaactaacagagttgaacatttcttttgacagtacagttttgaaacactctttttgtggagtctgcaagtggatatttggctggatttgaggatttcgttggaaacgcgataaggtataaaaagcagacagcagcattctcagcaatttctttgtgatgtttgcattcaagtcacagaattgaacattccctttcacagagcaggtttgaaacactctttttgtagtgtctgtaactggacttttggagcgctttccggcctaaggtgaaaaaggacatatcttcccataaaaactagacagaagcattgtcagaaacttactcgtgatgtgtgtcctcaactgacggagtagaacctttcttttgatagagcagttttgaaacactctttttgtagaatctccaagtggatatttggatagctttgaggatttcgttggaaacgggaatatcttcatataaaacctagacagaagtattatcagaaacttccttgtgattgttgcattcaagtcacagagttgaacattcgctttcatagagcatgtttgaaacactctttttccattacctggaagtggacttttggagcgctttgaggcctatggtgaaaaaggaaatatcttcccaaaaaaactagacagaagcattctcagaaacttatttgtgatgtgtgtcctcaactgacagagttgaacatttcttttgagagagcagttttgaaacactctttttgtggaatctgcaagtggatatttggctggctttgaggatttcgttggaaacgggaatacatataaaaagcagacagcagcgttctgagaaacttcttggtgatgtttgcattcaagtcacagaattgaacattccctttgatagaacaggtttgaaacactccttttctcatatctggaagtgtccatttggagcgcattcaggcttgtgttgaaaaaggaaatatcttcccataacaactagacagaagcattctcagaaactagtttctgatgtgtgtcctcaactaacacagttgaacatttctttagacagaacagttttgaaacactctttttgtggaatctgcaagtggatatttggctagatttgagcatttcgttggaaacgggattacatataaaaagcacacagcagcattctcagcaacttctttgtgatgtttgcattcaagtcacagaattgaacattccctttcacagagcaggtttgaaacactctttttgtagtgtctgtaactggacttttggagcgctttccggcctaaggtgaaaaaggacatatcttcccataaaaactagacagaagcattgtcagaaacttactcgtgatgtgtgtcctcaactgacggagtagaacctttcttttgatagagcagttttgaaacactctttttgtagaatctccaagtggatatttggatagctttgaggatttcgttggaaacgggaatatcttcatataaaacctagacagaagcattctcagaaacttccttgtgatggttgcattcaagtcacggagttgaacattggctttcatagagcaggttggaaacactctttttccattccctggaagtggacatttggagcgctttgaggcctatggtgaaaaaggaaatatcttcccataaaaactagacagaagcattctcagaaacttatttgtgatgtgtgtcctcaactgacagagttgaacatttcttttgagagagcagttttgaaacactctttttgtggaatctgcaagtggatatttggctggctttgaggatttcgttggaaacgggaatacatataaaaagcagacagcagcgttctgagaaacttcttggtgatgtttgcattcaagtcacagaattgaacattccctttgatggaacaggtttgaaacactctttttctcatatctggaagtgtccattcggagcgcattcaggcttgtgttgaaaaaggatatatcttcccataacaactagacagaagcattctcagaaactagtttctgatgtgtgtcgtcaactaacacagttgaacatttctttagacagaacagttttgaaacactctttttgtggaatttgcaagtggatatttggctagatttgagcatttcgttggaaacgggattacatataaaaagcagacagcagggttctgagaaacatctttgtgatgtttgtattcaggacacagagttgaacattccctatcatagagcaggtttgaatcactccttttgtagtatctggaagtggacatttggagcgctttccggcctcaggtgaaaaaggaaatatcttcccataaaaactagacagaagcattgtcagaaacttactcgtgatgtgtgtcctcaactgacggagtagaacctttcttttgatagagcagttttgaaacactctttttgtagaatctccaagtggatatttggatagctttgaggatttcgttggaaacgggaatatcttcatataaaacctagacagaagcattctcagaaacttccttgtgatggttgcattcaagtcacggagttgaacattggctttcatacagtaggttggaaacactctttttccattccctggaagtggacatttggagcgctttgaggcctatggtgaaaaaggaaatatcttcccataaaaactagacagaagcattctcagaaacttctttgtgatgtgtgtcctcaactgacagagttgaacatgtcttttgagagagcagttttgaaacactctttctgtggaacctgcaagtggatatttggctggctttgacgatttcgttggaaacgggaatacatataaaaagcagacagcagcgttctgagaaactacttggtgatgtttgcattcaagtcacagaatggaacgttccctttcacagaacaggtttgaaacactccttttgtcgtatctggaagtgtccatttggagcgcattcaggcttgtgttggaaaaggaaatatcttcccataaaaaccagacagaagcattctcggcaacttgtttgtgatgtgtgccctctactaacagagtcgaacctttcttttcatagagcagttttgaaacactctttttgtagaatctgcaggagcatatttgcatatctttgaggatttcgttggaaacgggattgtcttcagataaaatccagacagaagcattctcagaaacttctttgggatgtttgcattgacgtcacagaggagaacatgccctttcgtagagaaggtttgaaacactctctttgcagtatctggaagtggacatttgaagcggtttcaggcctatgttgaaaaaggaaatatcttcccgtaacaactggacagaagcattctcagaagctagtctctgatgtgtgtcctcaactaacagagttgaacatttctttggagagtatagttttgaaacactctttttgtggagtctgcaagtggatatttggctggatttgaggatttcgttggaaacgggataaggtacaaaaagcagacagcagcattctcagcaacttctttgtgatctttgcattcaagttacagaattgaacattccctttcacagagcaggtttgaaacactctttttgtagtgtctgtaactggacttttggagcgctttccggcctaaggtgaaaaaggacatatcttcccataaaaactagacagaagcattctcagaaacttactcgtgatgtgtgtcctcaactaaaggggtagaacctttcttttgatagagcagttttgaaacactctttttgtagaatctgcaagtggatattttgatagctttgtggatttccttggaaacgggaatatcttcgtataaaatctagagagaagtattatcagaaacttccttgtgatggttgcattcaagtcacagagttgaacattcgctttcatagagcatgtttgaaacactctttttccattacctggaagtggacatttggagcgctttgaggcctatggtgaaaaaggaaatatcttcccaaaaaaactagacagaagcgttctcagaaacttatttgtgatgtgtgtcctcaactgacattgttgaacatttcttttgagcgagcagttttgaaacactctttttgtggaatctgcaagtggatatttggctggctttgacgattttgttggaaacgggaatacatataaaacgcagacagcagcgttctgagaaactacttggtgatgtttgcattcaagtcacagaacgggaacgttccctttcacagaacaggtttgaaactctccttttgtcgtatctggaagtgtccatttggatcgcattcaggcttgtgttgaaaaaggaaatatcttcccataaaaactagacagaagccttctcggcaacttgtttgtgatgtgtgccctctactaacagagtcgaacctttctattcatagagcagttttgaaacactctttttgtagaatctgcaggagcatatttgcatagctttgaggatttcgttggaaacgggattgtcttcagataaaatccagacagaagcattctcagaaacttctttgggatgtttgcattgacgtcactgaggagaacatgccctttcgtagagaaggtttgaaacactctctttgcagtatctggaagtggacatttgaagcggtttcaggcctatgttgaaaaaggaaatatcttcccgtaacaactggacagaagcattctcagaagctagtctctgatgtgtgtcctcaactaacagagttgaacatttctttggagagtatagttttgaaacactctttttgtggagtctgcaagtggatatttggctggatttgaggatttcgttggaaacgggataaggtacaaaaagcagacagcagcattctcagcaacttctttgtgatctttgcattcaagttacagaattgaacattccctttcacagagcaggtttgaaacaatctttttgtagtgtctgtaactggacttttggagcgctttccggcctaaggtgaaaaaggacatatcttcccataaaaactagacagaagcattgtcagaaacttactcgtgatgtgtgtcctcaacagacggagtagaacctttcttttgatagagcagttttgaaacactctttttgtagaatctccaagtggatatttggatagctttgaggatttcgttggaaacgggaatatcttcatataaaacctagacagaagtattatcagaaacttccttgtgatggttgcattcaagtcacagagttgaacattcgctttcatagagcatgtttgaaacactctttttccattacctggaagtggacatttggagcgctttgaggcctatggtgaaaaaggaaatatcttcccaaagaaactagacagaagcattctcagaaacttatttgtgatgtgtgtcctcaactgacagagttgaacatttcttttgagagagcagttttgaaacattctttttgtggaatctgcaagtggatatttggctggctttgaggatttcgttggaaacgggaatacatataaaaagcagacagcagcattctcagaaacttccttgggatgtttgcatacaagtcacagaggagaacatgccctttcgtagagaaggtttgaaacattctctttgtagtatctggaagtggacatttggagcagtttcaggcctaagttgaaaaaggaaatatcttcccttaaaaactggacagaagcattctcagaagatagtctctaatgtgtgtcctcaactaacagagttgaagatttctgtagacagaaaagttttgaaacactctttttgtggagtctgcaagtggatatttggctagatttttaggatttctttggaaacgggattacatataaaaagccgacagcagcattctcagaaacttctttgtgatgtttgcattcaagtcacagaattaaacattccctttcacagagcaggtttgaaacactctatttgaagtgtctgtaagtggacatttggagcgctttacggcctatggtgaaaaaggacatatcttcccataaaaaccagacagaagcattctcagaaacttactcgtgatgtgtgtcctcaactaacggagtagaacctttcttttgatagagcagttttgaaacactctttttgtagaatctgcaagtggatatttggatagctttgaggatttcgttggaaacggaaatatcttcatataaaatcaagacagaagcattctcagaaacttccttgtgatggttgcattcaagtcacggagttgaacattcgctttcatagagcaggatggaaacactctttttgcattccctggaagtggacatttggagcgcttcgaggcctatggtgaaaaaggaaatattttcccctcaaaactagacagaagcattctcagaaacttatttgtgatgtgtgtcctcacctgacagagttgaacatttcttttgagagagcagttttgaaacactctttttgtggaatctgcaagtggatatttggctggctttgacgacttcgttggaaacgggaatacatataaaaagcagacagcagcgttctgagaaacttcttggtgatgtttgcattcaagtcactgaatggaaagttccctttcatagaacaggtttgaaactctccttttgtcgtaactggaagtgtccatttcgagcgcattcaggcttgtgttgaaaaaggaaatatcttcccataaaaactagacagaagcattctcagcaacttgtttgtgatgtgtgccctctactaacagagttgaacctttcttttcatagagcagttttgaaacactctttttgtagaatctgcaggaggatatttgcatagctttgaggatttcgttggaaatgggattgtcttcagataaaatccagacagaagcattctcagaaacttctttgggatgtttgcattgacgtcacagaggagaacatgccctttcgtagagaaggtttgaaacactctctttgcagtatctggaagtggacatttgaagtggtttcaggcctatgttgaaaaaggaaatatcttcccgtaacaactggacagaagcattctcagaagctagtctctgatgtgtgtcctcaactaacagagttgaacatttctttggagagtatagttttgaaacactctttttgtggagtctgcaagtggatatttggctggatttgaggatttcgttggaaacgcgataaggtataaaaagcagacagcagcattctcagcaacttctttgtgatgtttgcattcaagtcacagaattgaacattccctttcacagagcaggtttgaaacactctttttgtagtgtctgtaactggacttttggagcgctttccggcctaaggtgaaaaaggacatatcttcccataaaaactagacagaggcattctcagcaacttgtttgtgatgtgtgtcctcaaccaacggagtagaatctttcttttgatagagcagttttgaaacactctttttgtagaatctgcaagtggatatttggatagctttgaggatttcgttggaaacgggaatatcttcatataaaatctagacagaagcattctcagaaacttccttgtgatggttgcattcaagtcacggagttgaacattggctttcatagagcaggttggaaacactctttttccattccctggaagtggacatttggagcgctttgaggcctatggtgaaaaaggaaacatcttcccataaaaactagacagaagcattctcagaaacttctttgtgatgtgtgtcctcaactgacagagttgaacatgtcttttgagagagcagttctgaaacactctttctgtggaacctgcaagtggatatttggctggctttgacgatttcgttggaaacgggaatacatataaaaagcagacagcagcgttctgagaaacttcttggtgatgtttgcattcaagtcacagaattgaacattccctttgatagaacaggtttgaaacactccttttctcatatctggaagtgtccattcggagcgcattcaggcttgtgttgaaaaaggatatatcttcccataacaactagacagaagcattctcagaaactagtttctgatgtgtgtcctcaactaacacagttgaacatttctttagacagaacagttttgaaacactctttttgtggaatttgcaagtggatatttggctagatttgagcatttcgttggaaacgggattacatataaaaagcagacagcagcattctcagcaacttctttgtgatgtttgcattcaagtcacagaattgaacattccctttcacagagcaggtttgaaacactctttttgtagtgtctgtaactggacttttggagcgctttccggcctaaggtgaaaaaggacatatcttcccataaaaactagacagaagcattgtcagaaacttattcgtgatgtgtgtcctcaactgacggagtagaacctttcttttgatagaacagttttgaaacactctttttgtagaatctccaagtggatatttggatagctttgaggatttcgttggaaacgggaatatcttcatataaaatctagacagaagcattctcagaaacttccttgtgatggttgcattcaagtcacagagttgaacattcgctttcatagagcaggtttgaaacactctttttccattacctggaaggggacatttggagcgctttgaggcctatggtgaaaaaggaaatatcttcccataaaaactagacagaagcattctcagaaacttatttgtgatgtgtgtcctcaactgacagagttgaacatttcttttgagagagcagttttgaaacactctttttgtggaatctgcaagtggatatttggctggctttgaggatttcgttggaaacgggaatacatataaaaagcagacagcagcgttctgagaaacttcttggtgatgtttgcattcaagtcacagaattgaacattccctttaatagaacaggtttgaaacactccttttgtcatatctggaagtgtccatttggagcgcattcaggcttgtgttgaaaaaggaaatatcttcccataacaactagacagaagccttctcggcaacttgtttgtgatgtgtgccctctactaacagagtcgaacctttctattcatagagcagttttgaaacactctttttgtagaatctgcaggagcatatttggatagctttgaggatttcgttggaaacgggattgtcttcagataaaatccagacagaagcattctcagaaacttctttgggatgtttgcattgacgtcactgaggagaacatgccctttcgtagagaaggtttgaaacactctctttgcagtatctggaagtggacatttgaagcggtttcaggcctatgttgaaaaaggaaatatcttcccgtaacaactggacagaagcattctcagtaagatagtctctaatgtgtgtcctcaactaacagagttgaagatttctgtagacagaaaagttttgaaacactctttttgtggagtctgcaagtggatatttggctagatttttaggatttctttggaaacgggattacatataaaaagccgacagcagcattctcagcaacttctttgtgatgtttgcattcaagtcacagaattgaacattccctttcacagagcaggtttgaaacactctttttgtagtgtctgtaactggacttttggagcgctttccggcctaaggtgaaaaaggacatatcttcccataaaaactagacagaagcattctcagaaacttactcgtgatgtgtgtcctcaactaaaggggtagaacctttcttttgatagagcagttttgaaacactctttttgtagaatctgcaagtggatatttcgatagctttgtggatttcgttggaaacgggaatatcttcatataaaatctagagagaagcattctcagaaacttccttgtgatggttgcattcaagtcacggagttgaacattggctttcatagagcaggttggaaacactctttttccattccctggaagtggacatttggagcgctttgaggcctatggtgaaaaaggaaatatcttcccataaaaactagacagaagcattctcagaaacttatttgtgatgtgtgtcctcaactgacagagttgaacatttcttttgagagagcagttttgaaacactctttttgtggaatctgcaagtggatatttggctggctttgaggatttcgttggaaacgggaatacatataaaaagcagacagcagcgttctgagaaactacttggtgatgtttgcattcaagtcacagaatggaacgttccctttcacagaacaggtttgaaacactccttttgtcgtatctggaagtgtccatttggagcgcattcaggcttgtgttggaaaaggaaatatcttcccataaaaaccagacagaaacattctcggcaacttgtttgtgatgtgtgccctctactaacagagtcgaacctttcttttcatagagcagttttgaaacactctttttgtagaatctgcaggagcatatttgcatatctttgaggatttcgttggaaacgggattgtcctcagataaaatccagacagaagcattctcagaaacttctttgggatgtttgcattgacgtcactgaggagaacatgccctttcgtagagaaggtttgaaacactctctttgcagtatctggaagtggacatttgaagcggtttcaggcctatgttgaaaaaggaaatatcttcccgtaacaactggacagaagcattctcagaagctagtctctgatgtgtgtcctcaactaacagagttgaacatttctttggagagtatagttttgaaacactctttttgtggagtctgcaagtggatatttggctggatttgaggatttcgttggaaacgcgataaggtataaaaagcagacagcagcattctcagcaacttctttgtgatctttgcattcaagttacagaattgaacattccctttcacagagcaggtttgaaacactctttttgtagtgtctgtaactggacttttggagcgctttccggcctaaggtgaaaaaggacatatcttcccataaaaactagacagaagcattctcagaaacttactcgtgatgtgtgtcctcaactaaaggggtagaacctttcttttgatagagcagttttgaaacactctttttgtagaatctgcaagtggatatttcgatagctttgtggatttcgttggaaacgggaatatcttcatataaaatctagagagaagtattatcagaaacttccttgtgatggttgtattcaagtcacagagttgaacattcgctttcatagagcatgtttgaaacactctttttccattacctggaactggacatttggagcgctttgaggcctatggtgaaaaaggaaatatcttcccaaaaaaactagacagaagcattctcagaaacttctttgtgatgtgtgtcctcaactgacagagttgaacatgtcttttgagagagcagttttgaaacactctttctgtggaacctgcaagtggatatttggctggctttgacgatttcgttggaaacgggaatacatataaaaagcagacagctgcgttctgagaaactacttggtgatgtttgcattcaagtcacagaatggaacgttccctttcacagaacaggtttgaaacactccttttgtcgtatctggaagtgtccatttggagcgcattcaggcttgtgttggaaaaggaaatatcttcccaaaaaaatcagacagaagcattctcggcaacttgtttgtgatgtgtgccctctactaacagagtcgaacttttcttttcatagagcagttttgaaacactctttttgtagaatctgcaggagcatatttgcatatctttgaggatttcgttggaaacgggattgtcttcagataaaatccagacagaagcattctcagaaacttctttgggatgtttgcattgacgtcacagaggagaacatgccctttcgtagagaaggtttgaaacactctctttgcagtatctggaagtggacatttgaagtggtttcaggcctatgttgaaaaaggaaatatcttcccgtaacaactggacagaagaattctcagaagctagtctctcatgtgtgtcctcaactaacagagttgaacatttcttttgacagtacagttttgaaacactctttttgtggagtctgcaagtggatatttggctggatttgaggatttcgttggaaacgggataaggtataaaaagcagacagcagcattctcagcaacttctttgtgatgtttgcattcaagtcacagaattgaacattccctttcacagagcaggtttgaaacactctttttgtagtgtctgtaactggacttttggagcgctttccggcctaaggtgaaaaaggacatatcttcccataaaaactagacagaagcattgtcagaaacttactcgtgatgtgtgtcctcaactgacggagtagaacctttcttttgatagagcagttttgaaacactctttttgtagaatctccaagtggatatttggatagctttgaggatttcgttggaaacgggaatatcttcatataaaacctagacagaagtattatcagaaacttccttgtgatggttgcattcaagtcacagagttgaacattcgctttcatagagcatgtttgaaacactctttttccattacctggaagtggacttttggagcgctttgaggcctatggtgaaaaaggaaatatcttcccaaaaaaactagacagaagcattctcagaaacttatttgtgatgtgtgtcctcaactgacagagttgaacatgtcttttgagagagcagttttgaaacactctttctgtggaacctgcaagtggatatttggctggctttgacgatttcgttggaaacgggaatacatattaaaagcagtcagcagcgttctgagaaactacttggtgatgtttgcattcaagtcacagaatggaacgttccctttcacagaacaggtttgaaacactccttttgtcgtatctcgaagtgtccatttggagcgcattcaggcttgtgttggaaaaggaaatatcttcccataaaaaccagacagaagcattctcggcaacttgtttgtgatgtgtgccctctactaacagagtcgaacttttcttttcatagagcagttttgaaacactctttttgtagaatctgcaggagcatatttgcatatctttgaggatttcgttggaaacgggattgtcttcagataaaatccagacagaagcattctcagaaacttctttgagatgtttgcattgacgtcactgaggagaacatgccctttcgtagagaaggtttgaaacactctctttgcagtatctggaagtggacatttgaagcggtttcaggcctatgttgaaaaaggaaatatcttcccgtaacaactggacagaagcattctcagaagctagtctctgatgtgtgtcctcaactaacagagttgaacatttctttggagagtatagttttgaaacactctttttgtggagtctgcaagtggatatttggctggatttgaggatttcgttggaaacgcgataaggtataaaaagcagacagcagcattctcagcaatttctttgtgatgtttgcattcaagtcacagaattgaacattccctttcacagagcaggtttgaaacactctttttgtagtgtctgtaactggacttttggagcgctttccggcctaaggtgaaaaaggacatatcttcccataaaaactagacagaagcattgtcagaaacttactcgtgatgtgtgtcctcaactgacggagtagaacctttcttttgatagagcagttttgaaacactctttttgtagaatctccaagtggatatttggatagctttgaggatttcgttggaatcgggaatatcttcatataaaacctagacagaagcattctcagaaacttccttgagatggttgcattcaagtcacggagttgaacattggctttcatagagcaggttggaaacactctttttccattccctggaagtggacatttggagcactttgaggcctatggtgaaaaaggaaatatcttcccataaaaactagacagaagcattctcagaaatttatttgtgatgtgtgtcctcaactgacagagttgaacgtttcttttgagagagcagttttgaaacactctttttgtgcaatctgcaagtcgatatttggctggctttgacgaattcgttggaaacgggaatacatgtaaaaagcagacagcagcgttctcagaaacttcttggtgatgttttcattcaagtcacagaatggaacgttccctttcatagaacaggtttgcaactctccttttgtcgtaactggaagtgtccatttgtatggcattcaggcttgtgttgaaaaaggaaatatcttcccataaaaactagacagaagcattctcggcaacttgtttgtgatgtgtgccctctactaacagagtcgaacctttctattcatagaacagtttggaaacactctttttgtagaatctgcaggagcatatttgcatatctttgaggatttcgttggaaacgggattgtcttcagataaaatccagacagaagcattctcagaaacttctttgggatgtttgcattgacgtcacagaggagaacatgccctttcgtagagaaggtttgaaacactccctttgcagtatctggaagcggacatttgaagcggtttcaggcctatttagaaaaaggaaatatcttcccgtaacaactggacagaagcattctcagaagctagtctctgatgtgtgtcctcaactaacagagttgaacatttcttttgacagtacagttttgaaacactctttttgtggagtctgcaagtggatatttggctggatttgaggatttcgttggaaacgggataaggtataaaaagcagacagcagcattctcagcaatttctttgtgatgtttgcattcaagtcacagaatttaacattccctttcacagagcaggtttgaaacactctttttgtagtgtctgtaactggacttttggagcgctttccggcctaaggtgaaaaaggacatatcttcccataaaaactagacagaagcattctcagaaacttactcgtgatgtgtgtcctcaactaaaggggtaaaacctttcttttgatagagcagttttgaaacactctttttgtagaatctgcaagtggatatttcgatagctttgtggatttcgttggaaacgggaatatcttcatataaaatctagagagaagcattctcagaaacttccttgtgatggttgcattcaagtcactgagttgaacattcgctttcatagaggaggttggaaacactctttttcctttccctggaagtggacatttggagcgcttggaggcctatggtgaaaaagggagtgtcttcccatcaaaactagatagaagcgttctcagaaacttatttgtgatgtgtgtcctcaactgacattgttgaacatttcttttgagcgagcagttttgaaacactctttttgtggaatctgcaagtggatatttggctggctttgacgattttgttggaaacgggaatacatataaaaagcagatagcagcgttctcagaaacttcttggtgatgtttgcattgaagtcatagaatgaagcgtcccctttcatagaacaggtttgaaacactccttttgtcgtatctggaagtgtccattttgagcgaattcaagattgtgttgaaaaaggaaatattttcccacaaaaactagacagaagccttctcggcaacttgtttgtgatgtgtgccctctactaacagagtcgaacctttctattcatagagcagttttgaaacactccttttgtagaatctgaaggagcatatttgcatatctttgaggatttctttggaaacgggattgtcttcagataaaatccagacagaagcattctcagaaacttctttgggatgtttgcattgacgtcactgaggagaacatgccctttcgtagagaaggtttgaaacactctctttgcagtatctggaagtggacatttgaagcggtttcaggcctatgttgaaaaaggaaatatcttcccgtaacaactggacagaagcattctcagaagctagtctctgatgtgtgtcctcaactaacagagttgaacatttctttggagagtatagttttgaaacactctttttgtggagtctgcaagtggatatttggctggatttgaggatttcgttggaaacgggataaggtataaaaagcagacagcagcattctcagcaatttctttgtgatgtttgcattcaagtcacagaattgaacattccctttcacagagcaggtttgaaacactctttttgtagtgtctgtaactggacttttggagcgctttccggcctaaggtgaaaaaggacatatcttcccataaaaactagacagaagcattctcagaaacttactcgtgatgtgtgtcctcaactaacggaatagaacctttcttttaatagagcagttttgaaacaatctttttgtagaatctgcatgtggatatttggatagctttgaggatttcattggaaacgggaatatcttcatataaaatctagacagaagcattctcagaaacttccttgtgatggttgcattcaagtcaccggagttgaacattggctttcatagagcaggttggaaacactctttttccattccctggaagtggacatttggagcgctttgaggcctatggtgaaaaaggaaatatcttcccataaaaactagacagaagcattctcagaaacttatttgtgatgtgtgtcctcacctgacagagttgaacatttcttttgagagagcagttttgaaacactctttttgtggaatctgcaagtggatatttggctggctttgacgacttcgttggaaacgggaatacatataaaaagcagacagcagcgttctgagaaactacttggtgatgtttgcattcaagtcacagaatggaacgttccctttcacagaacaggtttgaaacactccttttgtcgtatctggaagtgtccatttggagcgcattcaggcttgtgttggaaaaggaaatatcttcccataaaaaccagacagaagccttcttggcaacttgtttgtgatgtgtgccctctactaacagagtcgaacatttctattcatagagcagttttgaaacactctttttgtagaatctgcaggagcatatttgcatatctttgaggatttcgttggaaacgggattgtcttcagataaaatccagacagaagcattctcagaaacttctttgggatgtttgcattcaagtcacagaggagaacatgccctttcgtagagaaggtttgaaacactctttttgtagtatgtggaagtggacatttggagcggtttcaggcgtatgttgaaaaaggaaatatcttcccgtaacaagtggagagaagcattctcagaagctagtctctgatgtgtgtcctcaactaacagagttgaacatttctttggagagtatagttttgaaacactctttttgtggagtctgcaagtggatatttggctggatttgaggatttcgttggaaacgggataaggtataaaaagcagacagcagcattctcagaaacttccttgtgatgattgcattcaagtcacggagttgaacatttgctttcatagagcaggttggaaacaatccttttccattccctggaagtggacgtttggagcgcttcaaggcctatggtgaaaaaggaaatatcttccaataaaaactagacagaagcattctcagaaacttatttgtgatgtgtgccctgaactaacgaagtagaacctttcttttgatagagcagttttgaaacactctttttgtaaaatctgcaagtggatatttgcatagctttgaggatttcattggaaacgggaatatcttcatataaaatctagacagaagcattctcagaaacttccttgtgatggttgcattcaaatcacggagttgaaaattcgctttcatagagcaggttggaaacactctttttccattccctggaagtggacatttggagcgcttcgaggcctatggtgaaaaaggaaatatcttcccatcaaaactagacagaagcattctcagaaacttctttgggatgtgtgtcctcaactgacacagttgaatatttcttttgagagagcagttttgaaactctctttttgtggaatctgcaagtggatattttgctggctttgacgatttcgttggaaacgggaatacatataaaaagcagacagcagcgttctgagaaactacttggtgatgtttgcattcaagtcacagaatggaacgttccctttcacagaacaggtttgaaacactccttttgtcgtatctggaagtgtccatttggagcgcattcaggcttgtgttggaaaaggaaatatcttcccataaaaaccagacagaagcattctcggcaacttgtttgtgatgtttgccctctactaacagggtcgtacctttcttttcctagagcagttttgaaacactctttttgtagaatctgcaggagcatatttgcatagctttgaggatttcgttcgaaacgggattgtcttcagataaaatccagacagaagcattctcagaaacttctttgggatgtttgcattgacgtcacagaggagaacatgccctttcgtagagaaggtttgaaacactctctttgcagtatctggaagtggacatttgaagcggtttcaggcctatgttgaaaaaggaaatatcttcccgtaacaactggacagaagcattctcagaagctagtctctgaagtgtgttctcaactaacagagttgaacatttctttggacagtacagttttgaaacactctttttgtggagactgcaagtggatacttggctagatttgaggatttcgttggaaacgggataaggtatcaaaagcagacagcagcattctcagcaacttctttgtgatgtttgcattcaagtcacagaattgaacattccctttcacagagcaggtctgaaacactctttttgtagtgtctgtaactggacttttggggcgctttccggactaaggtgaaaaaggacctatcttcccataaaaactacacagaagcattgtcagaaacttattcgtgatgtgtgtcctcaactgacggagtagaacctttcttttgatagagcagttttgaaacactctttttgtagaatctccaagtggatatttggatagctttgaggatttcgttggaaacgggaatatcttcatataaaatctagacagaagcattctcagaaacttccttgtgatggttgcattcaagtcacggagttgaacattggctttcatagagcaggttggaaacactctttttccattccctggaagtggacatttggagcgctttgaggcctatggtgaaaaaggaaatatcttcccataaaaactagacagaagcattctcagaaacttatttgtgatgtgtgtcctcaactgacagagttgaacatttcttttgagagagcagttttgaaacactctttttgtggaatctgcaagtggatatttggctggctttgaggatttcgttggaaacgggaatacatataaaaagcagacagcagcgttctgagaaactacttggtgatgtttgcattcaagtcacagaatggaacgttccctttcacagaacaggtttgaaacactccttttgtcgtatctggaagtgtccatttggagcgcattcaggcttgtgttggaaaaggaaatatcttcccataaaaaccagacagaaacattctcggcaacttgtttgtgatgtgtgccctctactaacagagtcgaacctttcttttcatagagcagttttgaaacactctttttgtagaatctgcaggagcatatttgcatatctttgaggatttcgttggaaacgggattgtcctcagataaaatccagacagaagcattctcagaaacttctttgggatgtttgcattgacgtcacagaggagaacatgccctttcgtagagaaggtttgaaacactctctttgcagtatctggaagtggaaatttgaagcggtttcaggcctatgttgaaaaaggaaatatcttcccgtaacaactggacagaagcattctcagaagctagtctctgatgtgtgtcctcaactaacagagttgaacatttcttttgacagaaaagttttgaaacactctttttgaggagtctgcaagaggatatttgtctagatttgaggatatcgttggaaacgggtttacgtgtaaaaagcagacagcagcattctcagaaacttctttgtgatgtttgcattcaagtcacagaattgaacattctctttcacagagcagctttgaaacactctttttgtagtgtctgtaactggacttttggagcgctttccggactaaggtgaaaaaggacatatcttcccataaaaactagacagaagcattgtcagaaacttactcgtgatgtgtgtcctcaactgacggagtagaacctttcttttgatagagcagttttgaaacactctttttgtagaatctccaagtggatatttggatagctttgaggatttcgttggaaacgggaatatcttcatataaaacctagacagaagcattctcagaaactttccttgtgatggttgcattcaagtcacggagttgaacattggctttcatacagtaggttggaaacactctttttccattccctggaagtggacatttggagcgctttgaggactatggtgaaaaaggaaatatcttcccataaaaactagacagaagcattctcagaaacttctttgtgatgtgtgtcctcaactgacagagttgaacatgtcttttgagaaagcagttttgaaacaatctttctgtggaacctgcaagtggatatttggctggctttgacgatttcgttggaaacgggaatacatataaaaagcagacagcagcgttctgagaaactacttggtgatgtttgcattcaagtcacagaatggaacgttccctttcacagaacaggtttgaaacactccttttgtcgtatctggaagtgtccatttggagcgcattcaggcttgtgttggaaaaggaaatatcttcccataaaaaccagacagaagccttctcggcaacttgtttgtgatgtgtgccctctactaacagagtcgaacctttctattcatagagcagtcttgaaacactctttttgtagaatctgcaggagcatatttgcatagctttgaggatttcgttggaaacgggattgtcttcagataaaatccagacagaagcattctcagaaacttctttgggatgtttgcattgacgtcacagaggagaacatgccctttcgtagagaaggtttgaaacactccctttgcagtatctggaagcggacatttgaagcggtttcaggcctatttagaaaaaggaaatatcttcccgtaacaactggacagaagcattctcagaagctagtctctgatgtgtgtcctcaactaacagagttgaacatttcttttgacagtacagttttgaaacactctttttgtgcagtctgcaagtggatatttggctggatttgaggatttcgttggaaacgcgataaggtataaaaagcagatagcagcattctcagcaatttctttgtgatgtttgcattcaagtcacagaattgaacattccctttcacagagcaggtttgaaacactctttttgtagtgtctgtaactggacttttggagcgctttccggcctaaggtgaaaaaggacatatcttcccataaaaactagacagaagcattgtcagaaacttactcgtgatgtgtgtcctcaactgacggagtagaacctttcttttgatagagcagttttgaaacactctttttgtagaatctccaagtggatatttggatagctttgaggatttcgttggaaacgggaatatcttcatataaaacctagacagaaatattatcagaaacttccttgtgatggttgcattcaagtcacagagttgaacattcgctttcatagagcatgtttgaaacactctttttccattacctggaagtggacttttggagcgctttgaggcctatggtgaaaaaggaaatatcttcccaaaaaaactagacagaagcattctcagaaacttatttgtgatgtgtgtcctcaactgacagagttgaacatttcttttgagagagcagttttgaaacactctttttgtggaatctgcaagtggatatttggctggctttgaggatttcgttggaaacgggaatacatataaaaagcagacagctgcgttctgagaaactacttggtgatgtttgcattcaagtcacagaatggaacgttccctttcacagaacaggtttgaaacactccttttgtcgtatctggaagtgtccatttggagcgcattcaggcttgtgttggaaaaggaaatatcttcccaaaaaaatcagacagaagcattctcggcaacttgtttgtgatgtgtgccctctactaacagagtcgaacttttcttttcatagagcagttttgaaacactctttttgtagaatctgcaggagcatatttgcatatctttgaggatttcgttggaaacgggattgtcttcagataaaatccagacagaagcattctcagaaagttctttgggatgtttgcattgacgtcacagaggagaacatgccctttcgtagagaaggtttgaaacactctctttgcagtatctggaagtggacacttgaagcggtttcaggcctatgttgaaaaaggaaatatcttcccgtaacaactggacagaagcattctcagaagctagtctctgatgtgtgtcctcaactaacagagttgaacatttctttggagagtatagttttgaaacactctttttgtggagtctgcaagtggatatttggctggatttgaggatttcgttggaaacgggataaggtataaaaagcagacagcagcattctcagcaacttctttgtgatctttgcattcaagttacagaattgaacattccctttcacagagcaggtttgaaacactctttttgtagtgtctgtaactggacttttggagcgctttccggcctaaggtgaaaaaggacatatcttcccataaaaactagacagaagcattctcagaaacttactcgtgatgtgtgtcctcaactaacggagtagaacctttcttttgatagagcagttttgaaacactctttttgtagaatctgcaagtggatatttggatagctttgaggatttcgttggaaacgggaagatcttcatataaaatcaagacagaagcattctcagaaacttccttgtgatggttgcattcaagtcacggagttgaacattggctttcatagagcaggttggaaacactctttttccattccctggaagtggacatttggagcgctttgaggcctatggtgaaaaaggaaatatcttcccataaaaactagacagaagcattctcagaaacttctttgtgatgtgtgtcctcaactgacagagttgaacatgtcttttgagagagtcgtttgaaacactctttttgtggaacatgcaagtggatatttggctgtttttgatgatttcgttggaaacgggaatacatataaaaagcagacagcagcgttctgagaaactacttggtgatgtttgcattcaagtcacagaatggaacgttccctttcatagaacagctttgaaacactccttttgtcgtatctggaagtgtccatttggagcgcattcaggcttgtgttggaaaaggaaatatcttcccataaaaaccagacagaagcattctcagaaactagattctgatgtgtgtcctcaactaacacagttgaacatttctttagacagaacagttttgaaacactctttttgtggaatttgcaagtggatatttggctagatttgagcatttcgttggaaacgggattacatataaaaagcagacagcagcattctcagaaacttctttgtgatgattgcattccagtcacagaattgaacattccctttcatagagcaggtttgaaacactctttttgtagtgtctgtaagtggacatttggagcgctttccggcctcaggtgaaaaaggaaatatcttcccataaaaactagacagaagcattctcagaaacttactcgtgatatgtgtcctcagctaaaggagtagaacctttcttttcatagagcagttttgaaacactctttttgtagaatctgcaagtggatatttcgatagctttgtggatttcgttggaaacgggaatatcttcatataaaatctagacagaagcattctcagaaacttccttgtgatggttgcattcaagtcacagagttgaacattcgctttcatagagcaggtttgaagcactctttttccattacctggaagtggacatttggagcgctttgaggcctatggtgaaaaaggaaatatcttcccaaaaaaactagacagaagcattctcagaaacttcattgtgatgtgtgtcctcaactgacagagttgaacatgtcttttgagagagcagttttgaaacactctttctgtggaacctgcaagtggatatttagctggtttgacgatttcgttggaaacgggaatacatataaaaatcagacagcagcgttctgagaaactacttggtgatgtttgcattcaagtcacagaatggaacgttccctttcacagaacaggtttgaaacactccttttgtcgtatctggaagtgtccatttggagcgcattcaggcctgtgttggaaaaggaaatatcttcccataaaaaccagacagaagccttctcggcaacttgtttgtgatgtgtgccctctactaacagagtcgaacctttctattcatagagcagttttgaaacactccttttgtagaatctgaaggagcatatttgcatatctttgaggatttctttggaaacgggattgtcttcagataaaatccagacagaagcattctcagaaacttctttgggatgtttgcattgacgtcacagaggagaacatgccctttcgtagagaaggtttgaaacactctctttgcagtatctggaagtggacatttgaagtggtttcaggcctatgttgaaaaaggaaatatcttcccgtaacaactggacagaagaattctcagaagctagtctctcatgtgtgtcctcaactaacagagttgaacatttcttttgacagtacagttttgaaacactctttttgtggagtctgcaagtggatatttggctggatttgaggatttcgttggaaacgggataaggtataaaaagcagacagcagcattctcagaaacttcttagtgatatttgcattcaagtcacagaattgaacattccctttcacagagcaggtttgaaacactctttttgtagtgtctgtaagtggacctttggagcgctttccggcctgaggtgaaaaaggacatatcttcccatacaaactagacagaagcattctcagaaacttactcgtgatgtgtgtcctcaactaaaggggtagaaactttcttttcatagagcagttttgaaacactctttttgtagaatctgcaagtggatatttcgatagctttgtggatttcgttggaaacgggaatatcttcatataaaatctagagagaagcattctcagaaacttccttgtgatggttgcattcaagtcacggagttgaacattggctttcatagagcaggttggaaacactctttttccattccctggaagtggacatttggagtgctttgaggcctttggtgaaaaaggaaatatcttcccataaaaactagacagaagcattctcagaaacttctttgtgatgtgtgtcctcaactgacagagttgaacatgtcttttgagaaagcagttttgaaacactctttctgtggaacctgcaagtggatatttggctggctttgacgatttcgttggaaacgggaatacatataaaaagcagacagcagcgttctgagaaactacttggtgatgtttgcattcaagtcacagaatggaacgttccctttcacagaacaggtttgaaacactccttttgtcgtatctcgaagtgtccatttggagcgcattcaggcttgtgttggaaaaggaaatatcttcccataaaaatcagacagaagccttctcggcaacttgtttgtgatgtgtgccctctactaacagagtcgaacctttctattcatagagcagttttgaaacactccttttgtagaatctgaaggagcatatttgcatatctttgaggatttctttggaaacgggattgtcttcagataaaatccagacagaagcattctcagaaacttctttgggatgtttgcattgacgtcacagaggagaacatgccctttcgtagagaaggtttgaaacactctctttgcagtatctggaagtggacatttgaagcggtttcaggcctatgttgaaaaaggaaatatcttcccgtaacaactggacagaagcattctcagaagctagtctctgatgtgtgtcctcaactaacagagttgaacatttctttggagagtatagttttgaaacactctttttgtggagtctgcaagtggatatttggctggatttgaggatttcgttggaaacgcgataaggtataaaaagcagacagcagcattctcagcaacttctttgtgatgtttgcattcaagtcacagaattgaacattccctttcacagagcaggtttgaaacactctttttgtagtgtctgtaactggacttttggagcgctttccggcctaaggtgaaaaaggacatatcttcccataaaaactagacagaagcattctcagaaacttactcgtgatgtgtgtcctcaactaaaggggtagaaactttcttttgatagagcagttttgaaacactctttttgtagaatctgcaactggatatttcgatagctttgtggatttcgttggaaacgggaatatcttcatataaaatctagagagaagtattatcagaaacttccttgtgatggttgcattcaagtcacagagttgaacattcgctttcatagagcatgtttgaaacactctttttccattacctggaagtggacatttggagcgctttgaggcctatggtgaaaaaggaaatatcttcccaaaaaaactagacagaagcattctcagaaatttatttgtgatgtgtgtcctcaactgacagagttgaacatttcttttgagagagcagttttgaaacactctttttgtgcaatctgcaagtcgatatttggctggctttgacgaattcgttggaaacgggaatacatataaaaagcagacagcagcgttctgagaaactacttggtgatgtttgcattcaagtcacagaatggaacgttccctttcacagaacaggtttgaaacactctttttgtcgtatctggaagtgtccatttggagcgcattcaggcttgtgttggaaaaggaaatatcttcccataaaaaccagacagaagccttctcggcaacttgtttgtgatgtgtgccctctactaacagagtcgaacctttctattcatagagcagttttgaaacactctttttgtagaatctgcaggagcatatttgcatagctttgaggatttcgttggaaacgggattgtcttcagataaaatccagacagaagcattctcagaaacttctttgggatgtttgcattgacgtcactgaggagaacatgccctttcgtagagaaggtttgaaaccctctctttgcagtatctggaagtggatatttgaagcggtttcaggcctatgttgaaaaggaaacatattcccgtaacaactggacagaagcattctcagaaactagtttctgatgtgtgtcctcaactaacacagttgtacatttctttagacagaacagttttgaaacactctttttgtggaatctgcaagtggatatttggctagatttgagcatttcgttggaaacgggattacatagaaaaagcagacagcagcatactcagaaacttctttgtgatgattgcattccagtcacagaattgaacattccctttcatagagcaggtttgaaacactctttttgtagtgtctgtaagtggacatttggagcgctttccggcctcaggtgaaaaaggaaatatcttcccataaaaactagacagaagcattctcagaaacttactcgtgatgtgtgtcctcaactaaaggggtagaacctttcttttgatagagcagttttgaaacactctttttgtagaatctgcaagtggatatttcgatagctttgtggatttcgttggaaacgggaatatcttcatataaaatctagagagaagtattatcagaaacttccttttgatggttgcattcaagtcacagagttgaacattcgctttcatagagcatgtttgaaacactctttttccattacctggaagtggacttttggagcgctttgaggcctatggtgaaaaaggaaatatcttcccaaaaaaactagacagaagcattctcagaaacttatttgtgatgtgtgtcctcaactgacagagttgaacatttcttttgagagagcagttttgaaacactctttttgtggaatctgcaagtggatatttggctggctttgaggatttcgttggaaacgggaatacatataaaaagcagacagcagcgtctgagaaactacttggtgatgtttgcattcaagtcacagaatggaacgttccctttcccagaaaaggtttgaaacactcctttagtcgtatctggaagtgtccatttggagcgcattcaggcttgtgttggaaaaggaaatatcttcccataaaaaccagacagaagcattctcagcaacttgtttgtgatgtgtgccctctactaacagagttgaacctttcttttcatagagcagttttgaaacactctttttgtagaatctgcaggaggatatttgcatagctttgaggatttcgttggaaacgggattgtcttcagataaaatccagacagaagcattctcagaaacttcgctgggatgtttccattcaagtcacagaggagaacatgccctttcgtagagaaggtttaaaacactctttttgtagtatctggaagtggacatttggagcagtttcaggcctatgttgaaaaaggaaatatcttcccttaacaactggacagaagcattctcagaagctagtctctgatgtgtgtcctcaactaacagagttgaacatttctttagacagaacagttttgaaacactctttttgtggagtctgcaagtggatatttggctagatttttaggatttcgttggaaacgggattacgtataaaaagccgacagcagcattctcagaaacttctttgtgatgtttgcattcaagtcacagaattgaacattccctttcacagatcaggtttgaaaccctctttttgtagtgtctgtaagtggacgtttggagcgctttccgacctaaggtgaaaaaggacatatctttccataaaaactagacagaagcattgtcagaaacttactcgtgatgtgtgtcctcaactgacggagtagaacctttcttttgatagagcagttttgaaacactctttttgtagaatctccaagtggatatttggatagctttgaggatttcgttggaaacgggaatatcttcatataaaacctagacagaagcattctcagaaacttccttgtgatggttgcattcaagtcacggagttgaacattcgctttcgtagagcaggttgataacactctttttcaattccctggaagtggacatttggagagctttgaggcctatggtgaaaaaggaaatatcttcccataaaaactagacagaagcattctcagaaacttctttgtgatgtgtgtcctcaactgacagagttgaaaatgtcttttgagagagcagttttcaaacactctttctgtggaacctgcaagtggatatttggctggctttgacgatttcgttggaaacgggaatacatataaaaagcagacagcagcgttctgagaaactacttggtgatgtttgcattcaagtcacagaatggaacgttccctttcatagaacaggtttgaaacacgccttttgtcgtatctggaagtgtccatttggagcgcattcaggctagtgttggaaaaggaaatatcttcccataaaaaccagacagaagcattctcggcaacttgtttgtgatgtttgccctctactaacagggtcgtacctttcttttcctagagcagttttgaaacactctttttgtagaatctgcaggagcatatttgcatagctttgaggatttcgttcgaaacgggattgtcttcagataaaatccagacagaagcattctcagaaacttctttgggatgtttgcattgacgtcacagaggagaacatgccctttcgtagagaaggtttgaaacactctctttgcagtatctggaagtggacatttgaagcgatttcaggcctatgttgaaaaaggaaatatcttcccgtaacaactggacagaagcattcccagaagctagtctctgatgtttgtcctcaactaacagagttgaacatttctttggagagtacagttttgcaacactctttttgtggagactgcaagtggatacttggctagatttgaggatttcgttggatacgggataaggtataaaaagcagacagcagcattctcagcaacttctttgtgatgtttgcattcaagtcacagaattgaacattccctttcacagagcaggtttgaaacactctttttgtagtgtctgtaactggacatttggggcgctttccggcctaaggtgaaaaaggacatatcttcccataaaaactagacagaagcattgtcagaaacttactcgtgatgtgtgtcctcaactgacggagtagaacctttcttttgatagagcagttttgaaacactctttttgtagaatctccaagtggatatttggatagctttgaggatttcgttggaaacgggaatatcttcatataaaacctagacagaagtattatcagaaacttccttgtgatggttgcattcaagtcacagagttgaacattcgctttcatagagcatgtttgaaacactctttttccattacctggaagtggacttttggagcgctttgaggcctatggtgaaaaaggaaatatcttcccaaaaaaactagacagaagcattctcagaaacttatttgtgatgtgtgtcctcaactgacagagttgaacatttcttttgagagagcagttttgaaacactctttttgtggaatttgcaagtggatatttggctggcgttgacgacttcgttggaaacgggaatagatataaaaagcagacagcagcgttctgagaaacttcttggtgatgtttgcattcaagtcacagaatggaacgttccctttcatagaagaggtttgaaactctccttttgtcatatctggaagtgtccatttggagcgcattctggcttgtgttgaaaaaggaaatatcttcccataaaaactagacagaagcattctcagcaacttgtttgtgatgtgtgccctctactaacagagttgaacctttcttttcatagagcagttttgaaacactctttttgtagaatctgcaggaggatatttgcatagctttgaggatttcgttggaaacgggattgtcttcagataaaatccagacagaagcattctcagaaacttctttgggatgtttgcattgacgtcactgaggagaacatgccctttcgtagagaaggtttgaaacactctctttgcagtatctggaagtggacatttgaagcggtttcaggcctatgttgaaaaaggaaatatcttcccgtaacaactggacagaagaattctcagaagctagtctctcatgtgtgtcctcaactaacagagttgaacatttcttttgacagtacagttttgaaacactctttttgtggagtctgcaagtggatatttggctggatttgaggatttcgttggaaacgggataaggtataaaaagcagacagcagcattctcagcaacttctttgtgatgtttgcattcaagtcacagaattgaacattccctttcacatagcaggtttgaaacactctttttgtagtgtctgtaactggacttttggagcgctttccggcctaaggtgaaaaaggacatatcttcccataaaaactagacagaagcattgtcagaaacttactcgtgatgtgtgtcctcaactgacggagtagaacctttcttttgatagagcagttttgaaacactctttttgtagaatctccaagtggatatttggatagctttgaggatttcgttggaaacgggaatatcttcatataaaacctagacagaagtattatcagaaacttccttgtgatggttgcattcaagtcacagagttgaacattcgctttcatagagcatgtttgaaacactctttttccattacctggaagtggatatttggagcgctttgaggcctatggtgaaaaaggaaatatcttcccaaaaaaactagacagaagcattctcagaaacttatttgtgatgtgtgtcctcaactgacagagttgaacatttcttttgagagagcagttttgaaacactctttctgtggaatctgcaagtggatatttggctggctttgaggatttcgttggaaacgggaatacatataaaaagcagacagcagcgttctgagaaacttcttggtgatgtttgcattcaagtcacagaattgaacattccctttgatagaacaggtttgaaacactccttttctcatatctggaagtgtccattcggagcgcattcaggcttgtgttgaaaaaggatatatcttcccataacaactagacagaaacattctcggcaacttgtttgtgatgtgtgccctctactaacagagtcgaacctttcttttcatagagcagttttgaaacactctttttgtagaatctgcaggagcatatttgcatatctttgaggatttcgttggaaacgggattgtcctcagataaaatccagacagaagcattctcagaaacttctttgggatgtttgcattgacgtcacagaggagaacatgccctttcgtagagaaggtttgaaacactctctttgcagtatctggaagtggacatttgaagcggtttcaggcctatgttgaaaaaggaaatatcttcccgtaacaactggacagaagcattctcagaagctagtctctgatgtgtgtcctcaactaacagagttgaacatttctttggagagtatagttttgaaacactctttttgtggagtctgcaagtggatatttggctggatttgaggatttcgttggaaacgggataaggtataaaaagcagacagcagcattctcagcaacttctttgtgatctttgcattcaagttacagaattgaacattccctttcacagagcaggtttgaaacactctttttgtagtgtctgtaactggacttttggagcgctttccggcctaaggtgaaaaaggacatatcttcccataaaaactagacagaagcattctcagaaacttactcgtgatgtgtgtcctcaactaaaggggtagaacctttcttttgatagagcagttttgaaacaatctttttgtagaatctgcaagtggatatttcgatagctttgtggatttcgttggaaacgggaatatcttcatataaaatctagagagaagtattatcagaaacttcccttgtgatggttgcattcaagtcacagagttgaacattcgctttcatagagcatgtttgaaacactctttttccattacctggaagtggacttttggagcgctttgaggcctatggtgaaaaaggaaatatcttcccaaaaaaactagacagaagcattctcagaaacttctttgtgatgtgtgtcctcaactgacagagttgaacatgtcttttgagagagcagttttgaaacactctttctgtggaacctgcaagtggatatttggctggctttgacgatttcgttggaaacgggaatacatataaaaagcagacagcagcgttctgagaaacttcttggtgatgtttgcattcaagtcacagaatggaacgttccctttcatagaactgatttgaaactctccttttgtcgtatctggaagtgtccatttggagcgcattcaggcttgtgttgaaaaaggaaatatcttcccataaaaactagacagaagcattctcagcaacttgtttgtgatgtgtgccctctactaacagagttgaacctttcttttcatagagcagctttgaaacactctttttgtagaatctgcaggaggatatttgtatagatttgaggatttcgttggaaacgggattgtcttcagataaaatccagacagaagcattctcagaaagttctttgggatgtttgcattgacgtcacagaggagaacatgccctttcgtagagaaggtttgaaacactctctttgcagtatctggaagtggacacttgaagcggtttcaggcctatgttgaaaaaggaaatatcttcccgtaacaactggacagaagcattctcagaagctagtctctgatgtgtgtcctcaactaacagagttgaacatttctttggagagtatagttttgaaacactctttttgtggagtctgcaagtggatatttggctggatttgaggatttcgttggaaacgggataaggtacaaaaagcagacagcagcattctcagcaatttctttgtgatgtttgcattcaagtcacagaattgaacattccctttcacatagcaggtttgaaacactctttttgtagtgtctgtaactggacttttggagcgctttccggcctaaggtgaaaaaggacatatcttcccataaaaactagacagaagcattctcagcaaacttactcgtgatgtgtgtcctcaactaaaggggtagaacctttcttttgatagagcagttttgaaacactctttttgtagaatctgcaagtggatatttcgatagctttgtggatttcgttggaaacgggaatatcttcatataaaatctagagagaagtattatcagaaacttccttgtgatggttgcattcaagtcacagagttgaacattcgctttcatagagcatgtttgaaacactctttttccattacctggaagtggatatttggagcgctttgaggcctatggtgaaaaaggaaatatcttcccaaaaaaactagacagaagcattctcagaaacttatttgtgatgtgtgtcctcaactgacagagttgaacatttcttttgagagagcagttttgaaacactctttttgtggaatctgcaagtggatatttggctggctttgaggatttcgttggaaacgggaatacatataaaaagcagacagcagcgttctgagaaactacttggtgatgtttgcattcaagtcacagaatggaacgttccctttcacagaacaggtttgaaacactccttttgtcgtatctcgaagtgtccgtttggagcgcattcaggcttgtgttggaaaaggaaatatcttcccataaaaatcagacagaagcattctcggcaacttgtttgtgatgtgtgccctctactaacagagtcgaacctttctattcatagagcagttttgaaacactctttttgtagaatctgcaggagcatatttgtatatctttgaggatttggttggaaacgggattgtcttcagataaaatccagacagaagcattctcagaaacttctttgggatgtttgcattgacgtcactgaggagaacatgccctttcgtagagaaggtttgaaacactctctttgtagtatctggaagtggacatttgaagtggtttcaggcctatgttgaaaaaggaaatatcttcccgtaacaactggacagaagcattatcagaagctagtctctcatgtgtgaattcaactaacagagttgaacatttctttagacagaacagttttgaaacactctttttgtggagtctgcaagtggatatttggctagatttgaggatttcgttggaaacgggattacgtataaaaagcagacagcagcattctcagaaactactttgtgatgtttgcattcaagtcacagaattgaacattccctttcacagagcaggtttgaaacacactttttgtagtgtctgtaagtggacatttggagcgctttccggcctaaggtgaaaaaggacatatcttcccataaaaactagacagaagcattctcagaaacttactcgtgatgtgtgtcctcaactaaaggggtagaacctttcttttcatagagcagttttgaaacactctttttgtagaatctgcaagtggatatttcgatagctttgtggatttcgttggaaacgggaatatcttcatataaaatctagagagaagtattatcagaaacttccttgtgatggttgcattcaagtcacagagttgaacattcgctttcatagagcatgtttgaaacactctttttccattacctggaagtggacatttggagcgctttgaggcctatggtgaaaaaggaaatatcttcccaaaaaaactagacagaagcattctcagaaacttcattgtgatgtgtgtcctcaactgacagagttgaacatgtcttttgagagagcagttttgaaacactctttctgtggaacctgcaagtggatatttagctggtttgacgatttcgttggaaacgggaatacatataaaaagcagacagctgcgttctgagaaactacttggtgatgtttgcattcaagtcacagaatggaacgttccctttcacagaacaggtttgaaacactccttttgtcgtatctggaagtgtccatttggagcgcattcaggcttgtgttggaaaaggaaatatcttcccaaaaaaatcagacagaagcattctcggcaacttgtttgtgatgtgtgccctctactaacagagtcgaacctttctattcatagagcagttttgaaacactctttttgtagaatctgcaggagcatatttgcatatctttgaggatttcgttggaaacgggattgtcttcagataaaatccagacagaagcattctcagaaacttctttgggatgtttgcattgacgtcacagaggagaacatgccctttcgtagagaaggtttgaaacactctctttgcagtatctggaagtggacatttgaagtggtttcaggcctatgttgaaaaaggaaatatcttcccgtaacaactggacagaagcattctcagaagctagtctctgatgtgtgtcctcaactaacagagttgaacatttcttttgacagtacagttttgaaacactctttttgtggagtctgcaagtggatatttggctggatttgaggatttcgttggaaacgggataaggtataaaaagcagacagcagcattctcagaaacttctttgtgatgttggcattcaagtcacagaattgaacattccctttcacagagcaggtgtaaaacactctttttgtagtgtgtgtaagtggacctttggagcgctctccgtcctaaggtgaaaaaggacatatcttcccataaaaactagacagaagcattctcagaaagctactcgtgatgtgtgtcctcaactaacggagtagaacctttcttttgatagagcagttttgaaaaactctttttgtagaatctccaagtggatatttggatagctttgaggatttcattggaaacgggaatatcttcatataaaatctagacagaagcattctcagaaacttccttgtgatggttgctttcaagtcacggagttgaacattcgctttcatagagcaggttggaaacactctttttccattccctgaaagtggacgtttggagcgctttgaggcctaaggtggaaaaggaaatatcttcccataaaacctagacagaagcattctcagaaacttatttgtgatgtgtgtcctcaactgacagagttgaacatttcttttgagagagcagttttgaaacactctttttgtggaatctgcaagtggatatttggctggctttgaggatttcgttggaaacgggaatacatataaaaagcagacagcagcgttctgagaaactacttggtgatgtttgcattcaagtcacagaatggaacgttccctttcacagaacaggtttgaaacactccttttgtcgtatctcgaagtgtccgtttggagcgcattcaggcttgtgttggaaaaggaaatatcttcccataaaaatcagacagaagcattctcagcaacttgtttgtgatgtgtgccctctactaacagagttgaacctttcttttcatagagcagctttgaaacactctttttgtagaatctgcaggaggatatttgtatagatttgaggatttcgttggaaacgggattgtcttcagataaaatccagacagaagcattctcagaaacttctttgggatgtttgcattgacgtcacagaggagaacatgccctttcgtagagaaggtttgaaacactctctttgcagtatctggaagtggacatttgaagtggtttcaggcctatgttgaaaaaggaaatatcttcccgtaacaactggacagaagcattctcagaagctagtctctgatgtgtgtgctcaactaacagagttgaacatttcttttgacagaacagttttgaaacactctttttgtggagtctgcaagtggatatttggctaaatttttaggatttcgttggaaacgggattacatataaaaacccgtcagcagcattctcagaaacttctttgtgatgtttgcattcaagtcacagaattgaacattccctttcacagagcaggtttgaaacactctatttgtagtgtctgtaagtggacctttggagcgctttccggcctaaggtgaaaaaggacatatcttcccataaaaaccagacagaagcattctcagaaacttactcgtgatgtgtgtcctcaactgacgtagtagaacctttcttttgatagagcagttttgaaacactctttttgtagaatctgcaagaggatatttggatagctttgaggatttcgttggaaacgggaagatcttcatataaaatcaagacagaagaattctcagaaacttccttgtgatggttgcattcaagtcacggggttgaacattcactttcatagagcaggttggaaacactctttttccattccctggaagtggacatttggagcgctttgaggcctatggtgaaaaaggaaatatcttcccatcaaaactagacagaagcattctcagaaacttatttgtgatgtatgtcctcaactaacagattagaacatttcttttgagagagcagttttgaaacactctttttgtggaatctgcaagtggatatttggctggctttgatgatttcgttggacacggaaatacatataaaaagcagacagcagcgttctgagaaactacttggtgatgtttgcattcaagtcacagaatggaacgttccctttcacagaacaggtttgaaacactccttttgtcgtatctggaagtgtccatttggagcgcattcaggcttgtgttggaaaaggaaatatcttcccataaaaaccagacagaagcattctcagcaacttgtttgtgatgtgtgccctctactaacagagttgaacctttcttttcatagagcagttttgaaacactctttttgtagaatctgcaggaggatatttgcatagctttgaggatttcgttggaaacgggattgtcttcagataaaatccagacagaagcattctcagaaacttctttgggatgtttgcattgacgtcactgaggagaacatgccctttcgtagagaaggtttgaaacactctctttgcagtatctggaagtggacatttgaagcggtttcaggcctatgttgaaaaaggaaatatcttcccgtaacaactggacagaagcattctcagaagctagtctctgatgtgtgtcctcaactaacagagttgaacatttctttggagagtatagttttgaaaaactctttttgtggagtgtgcaagtggatatttggctggatttgaggatttcgttggaaacgggataaggtataaaaagcagacagcagcattctcagcaacttctttgtgatgtttgcattcaagtcacagaattgaacattccctttcacagagcaggtttgaaacactctttttgtagtgtctgtaactggacttttggagcgctttccggcctaaggtgaaaaaggacatatcttcccataaaaactagacagaagcattctcagaaagttactagtgatgtgtgtcctcaactaacggagtagaacctttcttttgatagagcagttttgaaacactctttttgtagaatctccaagtggatatttggatagctttgaggatttccttggaaacgggaatatcttcatataaaatctagacagaagcattctcagaaacttccttgtgatggttgcattcaagtcacggagttgaacattcgctttcatagagcaggttggaaacactctttttccattccctggaagtggacatttggagcgctttgaggcctatggtgaaaaaggaaatatcttcccatcaaaactagatagaagcgttctcagaaacttatttgtgatgtgtgtcctcaactgacattgttgaacatttcttttgagcgagcagttttgaaacactctttttgtggaatctgcaagtggatatttggctggctttgacgattttgttggaaacgggaatacatataaaaagcagacagcagcgttctcagaaacttcttggtgatgttttcattcaagtcacagaatggaacgttccctttcatagaacaggtttgaatctgtccttttgtcgtaactggaagtgtccatttcgagcgcattcaggcttgtgttgaaaaaggaaatatcttcccataaaaactagagagaagcattctcgcaactagtttgtgatttgtgccctctactaacagggtcgtacctttcttttcatagagcagttttgaaacactctttttgtagaatctgcaggagcatatttgcatagtttgaggatttcgttggaaacgggattgtcttcagataaaatccagacagaagcattctcagaaacttctttgggatgtttgcattgacgtcactgaggagaacatgccctttcgtagagaaggtttgaaacactctctttgcagtatctggaagtggacatttgaagcggtttcaggcctatgttgaaaaaggaaatatcttcccgtaacaactggacagaagcattctcagaagctagtctctgatgtgtgtcctcaactaacagagttgaacatttctttggagagtatagttttgaaacactctttttgtggagtctgcaagtggatatttggctggatttgaggatttcgttggaaacgggataaggtacaaaaagcagacagcagcattctcagaaacttccttgtgatggttgcattcaagtcacggagttgaacattcgctttcatagagcaggttggaaacactctttttccattccctggaagtggacatttggagcgctttgaggcctatggtgaaaaaggaaatgtcttcccataaaaacaagatagaagcattctcagaaacttattcgtgctgtgtgtcctcaactaacagagtagaacctttcttttgatagagcagttttgaaacactctttttgtagaatctgcaagtggacatttggatagctttgaggatttcgttggaaacgggaatatcttcacatgaaatctagacagaagcattctcagaaatttctttgcgatgtttgcattcaagtcacagagttgaacattccttttcatagagcaggcatgaaacactctttttctactatctggaagtggacatttggagctctttcaagcctatggtgacaaagtaaatatcttcccataaaaactagacagaagcactctcagaaacttattagtgatgtgtgtcctcacataacaggcttgaacatttcttttgacacagcagttttgaagcactctttttgtggaatctccaagtggatatttggctagctttgaggatttcgttggaaacggtaatgtcttcataaaaaatctagacagaagcattctcagcaaacttccttgtgatggttgcattcaagtcacggagttgaacattggctttcatagagcaggttggaaacactctttttccattccctggaagtggacatttggagcgctttgaggcctatggtgaaaaaggaaacatcttcccataaaaactagacagaagcattctcagaaacttatttgtgatgtgtgtcctcaactgacagagttgaacatttcttttgagagagcagttttgaaacactctttttgtggaatctgcaagtggatatttggctggctttgaggatttcgttggaaacgggaatacatataaaaagcagacagctgcgttctgagaaactacttggtgatgtttgcattcaagtcacagaatggaacgttccctttcacagaacaggtttgaaacactccttttgtcgtatctggaagtgtccatttggagcgcattcaggcttgtgttggaaaaggaaatatcttcccaaaaaaatcagacagaagccttctcggcaacttgtttgtgatgtgtgccctctactaacagagtcgaacctttctattcatagagcagttttgaaacactctttttgtagaatctgcaggagcatatttgcatagctttgaggatttcgttggaaacgggattgtcttcagataaaatccagacagaagcattctcagaaacttctttgggatgtttgcattgacgtcactgaggagaacatgccctttcgtagagaaggtttgaaacactctctttgcagtatctggaagtggacatttgaagcggtttcaggcctatgttgaaaaaggaaatatcttcccgtaacaactggacagaagcattctcagaagctagtctctgatgtgtgtcctcaactaacagagttgaacatttctttggagagtatagttttgaaacactctttttgtggagtctgcaagtggatatttggctggatttgaggatttcgttggaaacgggataaggtataaaaagcagacagcagcattctcagaaacttctttgtgatgtttgcattcaagtcacagaattgaacattctctttcacagagcagctttgaaacactctttttgtagtgtctgtaactagacttttggagcgctttccggactaaggtgaaaaaggacatatcttcccataaaaactagacagaagcattgtcagaaacttactcgtgatgtgtgtcctcaactgacggagtagaacctttcttttgatagagcagttttgaaacactctttttgtagaatctccaagtggatatttggatagctttgaggatttcgttggaaacgggaatatcttcatataaaacctagacagaagcattctcagaaacttccttgtgatggttgcattcaagtcacggagttgaacattggctttcatagagcaggttggaaacactctttttccattccctggaagtggacatgtggagcgctttgaggcctatggtgaaaaaggaaatatcttcccataaaaactagacagaagcattctcagaaacttctttgtgatgtgtgtcctcaactgacagagttgaacatgtcttttgagagagccgtttgaaacactctttttgtggaacatgcaagtggatatttggctgtctttgacgatttcgttggaaacgggaatacatataaaaagcagacagctgcgttctgagaaactacttggtgatgtttgcattcaagtcacagaatggaacgttccctttcacagaacaggtttgaaacactccttttgtcgtatctggaagtgtccatttggagcgcattcaggcttgtgttggaaaaggaaatatcttcccaaaaaaatcagacagaagccttctcggcaacttgtttgtgatgtgtgccctctactaacagagtcgaacctttctattcatagagcagttttgaaacactctttttgtagaatctgcaggagcatatttgcatagctttgaggatttcgttggaaacgggattgtcttcagataaaatccagacagaagcattctcagaaacttctttgggatgtttgcattgacgtcactgaggagaacatgccctttcgtagagaaggtttgaaacactctctttgcagtatctggaagtggacatttgaagcggtttcaggcctatgttgaaaaaggaaatatcttcccgtaacaactggacagaagcattctcagaagctagtctctgacgtgtgtcctcaactaacagagtagaacatttcttttgacagtacagttttgaaacactgtttttgtggagtctgcaagtggatatttggctagatttgaggatttcgttggaaacgggataaggtataaaaagcagacagcagcattctcagcaacttctttgtgatgtttgcattcaagtcacagaattgaacattccctttcacagagcaggtttgaaacactctttttgtagtgtctgtaactggacttttggagcgctttccggcctaaggtgaaaaaggacatatcttcccataaaaaccagacagaagcattgtcagaaacttactcgtgatgtgtgtcctcaactgacggagtagaacctttcttttgatagagcagttttgaaacactctttttgtagaatctccaagtggatatttgggtagctttgaggatttcgttggaaacgggaatatcttcatataaaacctagacagaagcattctcagaaacttccttgtgatggttgcattcaagtcacggagttgaacattggctttcatacagtaggttggaaacactctttttccattccctggaagtggacatttggagcgctttgaggcctatggtgaaaaaggaaatatcttcccataaaaactagacagaagcattctcagaaacttatttgtgatgtgtgtcctcaactgacagagttgaacatttcttttgagagaggagttttgaaacactctttttgtggaatctgcaagtggatatttggctggctttgaggatttcgttggaaacgggaatacatataaaaagcacacagcagcgttctcagaaacttcttggtgatgttttcattcaagtcacagaatggaacgttccctttcatagaacaggtttgaatctgtccttttgtcgtaactggaagtgtccatttggatcgcattcaggcttgtgttgaaaaaggaaatatcttcccataaaaactagagagaagcattctcggcaacttgtttgtgatgtgtgccctctactaacagagtcgaacctttctattcatagagcagttttgaaacactctttttgtagaatctgcaggagcatatttgcatatctttgaggatttcgttggaaacgggattgtcttcagataaaatccagacagaagcactctcagaaacttttttgggatgtttgcattcacgtcacagaggagagcatgccttttcgtagagaagttttcaaacactgtttttgtagtatctggaagtggacatttggagcggtttcaggactatgttgaaaaagcaaatatcttcccgtaacaactggacagaagcattctcagaagctagtctctgatgtgtgtcctcaactaacagagttgaacatttctttagacagaacagttttgaaacactctttttgtggagtctgcaagtggatatttggctagatttttaggatttcgttggaaacgggattacgtataaaaagccgacagcagcattctcagcaatttctttgtgatgtttgcattcaagtcacagaatttaacattccctttcacagagcaggtttgaaacactctttttgtagtgtctgtaactggacttttggagcgctttccggcctaaggtgaaaaaggacatatcttcccataaaaactagacagaagcattctcagaaacttactcgtgatatgtgacctgaactaatggagtagaagctttcttttgatagagcagttttgaaacactctttttgtaggatctgcaagtggatatttggatagctttgaggatttcgttggaaacgggaatatcttcatataaaatctagacagaagcattctcagaaacttccttgtgatggttgcattcaagtcacggagttgaacattggctttcatagagcaggttggaaacactctttttccattccctggaagtggacatttggagcgctttgaggcctatggtgaaaaaggaaatatcttcccataaaaactagacagaagcattctcagaaacttctttgtgatgtgtgtcctcaactgacagagttgaacatgtcttttgagagagcagttctgaaacactctttctgtggaacctgcaagtggatatttggctggctttgacgatttcgtaggaaacgggaatacatataaaaagcagacagcagcgttctcagaaacttcttggtgatgttttcattcaagtcacagaatggaacgttccctttcatagaacaggtttgaaactctccttttgtcgtaactggaagtgtccatttggatcgcattcaggcttgtgttgaaaaaggaaatatcttcccataaaaactagacagaagcattctcagcaacttgtttgtgatgtgtgccctctactaacagagttgaacctttcttttcatagagcagttttgaaacactctttttgtagaatctgcaggagggtatttgcatagtttaaggatttcgttggaaacgggattttcttcagataaaatccggacagaagcattctcagaaacttctttgggatgtttgcattcaagtcacagaggagaacatgccctttcgtagagaaggtttgaaacactctttttgtagtatgtggaagtggacatttggagcggtttcaggcgtatgttgaaaaaggaaatatcttcccgtaacaagtggagagaagcattatcagaagctagtctctcatgtgtgacttcaactaacagagttgaacatttctttagacagaacagttttgaaacactctttttgtggcgtctgcaagtgggtatttggctagatttgaggatttcgttggaaacgggattacgtataaaaagcagacagcagcattctcagaaacttctttgtgatgttggcattcaagtcacagaattgaacattccctttcacagagcaggtgtaaaacactctttttgtagtgtgtgtaagtggacctttggagcgctctccgtcctaaggtgaaaaaggacatatcttcccataaaaactagacagannnnnnnnnnnnnnnnnnnnnnnnnnnnnnnnnnnnnnnnnnnnnnnnnnnnnnnnnnnnnnnnnnnnnnnnnnnnnnnnnnnnnnnnnnnnnnnnnnnnagtcacagaatggaacgttccctttcatagaacaggtttgaaactctccttttgtcgtatctggaagtgtccatttggagcgcattcaggcttgtgttgaaaaaggaaatatcttcccataaaaactagacagaagcattctcagcaacttgtttgtgatgtgtgccctctactaacagagttgaacctttcttttcatagagcagttttgaaacactctttttgtagaatctgcaggaggatatttgcatagctttgaggatttcgttggaaacgggattgtcttcagataaaatccagacagaagcattctcagaaacttcgctgggatgtttccattcaagtcacagaggagaacatgccctttcgtagagaaggtttaaaacactctttttgtagtatctggaagtggacatttggagcagtttcaggcctatgttgaaaaaggaaatatcttcccttaacaactggacagaagtattctcagaagctagtctctgatgtgtgtcctcaactaacagagttgaacatttctttagacagaacagttttgaaaccctctttttgtggagtctgcaagtggatatttggctagatttttaggatttcgttggaaacgggattacgtataaaaagccgacagcagcattctcagaaacttctttgtgatgtttgcattcaagtcacagaattgaacattacctttgatagagcagttttgtaacactcttttggtagtgtctgtaagtggacatctggatcgctttccggcctaaggtgaaaaaggacatatcttcccataaaaaccagacagaagcattctcagaaacttactcgtgatgtgtgtcctcaactaacggagtagaacctttcttttgatagagcagatttgagaacacactttttgtagaatctgcaagtggatatttggatagctttgaggatttcattggaaacgggaatatcttcatataaaatctagacagaagcattctcagaaacttccttgtgatggttgcattcaattcacagagttgagcattcgctttcatagagcaggttggaaatactcattttccattccctggaagtggacatttggagcgcttcgaggcctatggtgaaaaaggaaacatcttcccataaaaactagacattagcattctcagaaatttatttgtgatgtgtgtcctcaactgacagagttgaacatttcttttgagagagcagttttgaaacactctttttgtgcaatctgcaagtcgatatttggctggctttgacgaattcgttggaaacgggaatacatataaaaagcagacagcagcgttctcagaaacttcttggtgatgttttcattcaagtcacagaatggaacgttccctttcatagaacaggtttgaaactctccttttgtcgtaactggaagtgtccatttggatcgcattcaggcttgtgttgaaaaaggaaatatcttcccataaaaactagacagaagcattctcagcaacttgtttgtgatgtgtgccctctactaacagagttgaacctttcttttcatagagcagttttgaaacactctttttgtagaatctgcaggagggtatttgcatagtttaaggatttcgttggaaacgggattttcttcagataaaatccggacagaagcattctcagaaacttctttgggatgtttgcattcaagtcacagaggagaacatgccctttcgtagagaaggtttgaaacactctttttgtagtatgtggaagtggacatttggagcggtttcaggcgtatgttgaaaaaggaaatatcttcccgtaacaagtggagagaagcattatcagaagctagtctctcatgtgtgacttcaactaacagagttgaacatttctttagacagaacagttttgaaacactctttttgtggcgtctgcaagtgggtatttggctagatttgaggatttcgttggaaacgggattacgtataaaaagcagacagcagcattctcagaaacttctttgtgatgttggcattcaagtcacagaattgaacattccctttcacagagcaggtgtaaaacactctttttgtagtgtctgtaagtggacgtttggagcgctttccgacctaaggtgaaaaaggacatatctttccataaaaactagacagaagcattctcagaaagttactagtgatgtgtgtcctcaactaacggagtagaacctttcttttgatagagcagttttgaaacactctttttgtagaatctccaagtggatatttggatagctttgaggatttccttggaaacgggaatatcttcatataaaatctagacagaagcattctcagaaacttccttgtgatggttgcattcaagtcacggagttgaacattcgctttcatagagcaggttggaaacactctttttccattccctggaagtggacatttggagcgctttgaggcctatggtgaaaaaggaaatatcttcccatcaaaactagatagaagcgttctcagaaacttatttgtgatgtgtgtcctcaactgacattgttgaacatttcttttgagcgagcagttttgaaacactctttttgtggaatctgcaagtggatatttggctggctttgacgattttgttggaaacgggaatacatataaaaagcagacagcagcgttctcagaaacttcttggtgatgttttcattcaagtcacagaatggaacgttccctttcatagaacaggtttgaatctgtccttttgtcgtaactggaagtgtccatttggatcgcattcaggcttgtgttgaaaaaggaaatatcttcccataaaaactagagagaagcattctcagcaacttgtttgtgatgtgtgccctctactaacagagttgaacctttcttttcatagagcagttttgaaacactctttttgtagaatctgcaggaggatatttgcatagtttgaggatttcgttggaaacgggattgtcttcagataaaatccagacagaagcattctcagaaacctctttgggatgtttgcattcaagtcacagaggagaacatgccgtttcgtagagaaggtttgaaacactctttttgtagtatctggaagtggacatttggagcggtttcaggcctatgttgaaaaaggaaatatcttcccgtaacaactggacagaagcattatcagaagctagtctctcatgtgtgaattcaactaacagagttgaacatttctttagacagaacagttttgaaacactctttttgtggagtctgcaagtggatatttggctagatttgaggatttcgttggaaacgggattacgtataaaaagcagacagcagcattctcagaaacttctttgtgatgtttgcattcaagtcacagaattgaacattccctttcacagagcaggtgtaaaacactctttttgtagtgtgtgtaagtggacctttggagcgctctccgtcctaaggtgaaaaaggacatatcttcccataaaaactagacacaagcattctcagaaacttactcgtgatatgtgacctgaactaatggagtagaagctttcttttgatagagcagttttgaaacactctttttgtaggatctgcaagtggatatttggatagctttgaggatttcgttggaaacgggaatatcttcatataaaatctagacagaagcattctcagaaacttccttgtgatggttgcattcaagtcacggagttgaacattcgctttcatagagcaggatggaaacactctttttccattccctggaagtggacatttggnnnnnnnnnnnnnnnnnnnnnnnnnnnnnnnnnnnnnnnnnnnnnnnnnnnnnnnnnnnnnnnnnnnnnnnnnnnnnnnnnnnnnnnnnnnnnnnnnnnnnnnnnnnnnnnnnnnnnnnnnnnnnnnnnnnnnnnnnnnnnnnnnnnnnnnnnnnnnnnnnnnnnnnnnnnnnnnnnnnnnnnnnnnnnnnnnnnnnnnnnnnnnnnnnnnnnnnnnnnnnnnnnnnnnnnnnnnnnnnnnnnnnnnnnnnnnnnnnnnnnnnnnnnnnnnnnnnnnnnnnnnnnnnnnnnnnnnnnnnnnnnnnnnnnnnnnnnnnnnnnnnnnnnnnnnnnnnnnnnnnnnnnnnnnnnnnnnnnnnnnnnnnnnnnnnnnnnnnnnnnnnnnnnnnnnnnnnnnnnnnnnnnnnnnnnnnnnnnnnnnnnnnnnnnnnnnnnnnnnnnnnnnnnnnnnnnnnnnnnnnnnnnnnnnnnnnnnnnnnnnnnnnnnnnnnnnnnnnnnnnnnnnnnnnnnnnnnnnnnnnnnnnnnnnnnnnnnnnnnnnnnnnnnnnnnnnnnnnnnnnnnnnnnnnnnnnnnnnnnnnnnnnnnnnnnnnnnnnnnnnnnnnnnnnnnnnnnnnnnnnnnnnnnnnnnnnnnnnnnnnnnnnnnnnnnnnnnnnnnnnnnnnnnnnnnnnnnnnnnnnnnnnnnnnnnnnnnnnnnnnnnnnnnnnnnnnnnnnnnnnnnnnnnnnnnnnnnnnnnnnnnnnnnnnnnnnnnnnnnnnnnnnnnnnnnnnnnnnnnnnnnnnnnnnnnnnnnnnnnnnnnnnnnnnnnnnnnnnnnnnnnnnnnnnnnnnnnnnnnnnnnnnnnnnnnnnnnnnnnnnnnnnnnnnnnnnnnnnnnnnnnnnnnnnnnnnnnnnnnnnnnnnnnnnnnnnnnnnnnnnnnnnnnnnnnnnnnnnnnnnnnnnnnnnnnnnnnnnnnnnnnnnnnnnnnnnnnnnnnnnnnnnnnnnnnnnnnnnnnnnnnnnnnnnnnnnnnnnnnnnnnnnnnnnnnnnnnnnnnnnnnnnnnnnnnnnnnnnnnnnnnnnnnnnnnnnnnnnnnnnnnnnnnnnnnnnnnnnnnnnnnnnnnnnnnnnnnnnnnnnnnnnnnnnnnnnnnnnnnnnnnnnnnnnnnnnnnnnnnnnnnnnnnnnnnnnnnnnnnnnnnnnnnnnnnnnnnnnnnnnnnnnnnnnnnnnnnnnnnnnnnnnnnnnnnnnnnnnnnnnnnnnnnnnnnnnnnnnnnnnnnnnnnnnnnnnnnnnnnnnnnnnnnnnnnnnnnnnnnnnnnnnnnnnnnnnnnnnnnnnnnnnnnnnnnnnnnnnnnnnnnnnnnnnnnnnnnnnnnnnnnnnnnnnnnnnnnnnnnnnnnnnnnnnnnnnnnnnnnnnnnnnnnnnnnnnnnnnnnnnnnnnnnnnnnnnnnnnnnnnnnnnnnnnnnnnnnnnnnnnnnnnnnnnnnnnnnnnnnnnnnnnnnnnnnnnnnnnnnnnnnnnnnnnnnnnnnnnnnnnnnnnnnnnnnnnnnnnnnnnnnnnnnnnnnnnnnnnnnnnnnnnnnnnnnnnnnnnnnnnnnnnnnnnnnnnnnnnnnnnnnnnnnnnnnnnnnnnnnnnnnnnnnnnnnnnnnnnnnnnnnnnnnnnnnnnnnnnnnnnnnnnnnnnnnnnnnnnnnnnnnnnnnnnnnnnnnnnnnnnnnnnnnnnnnnnnnnnnnnnnnnnnnnnnnnnnnnnnnnnnnnnnnnnnnnnnnnnnnnnnnnnnnnnnnnnnnnnnnnnnnnnnnnnnnnnnnnnnnnnnnnnnnnnnnnnnnnnnnnnnnnnnnnnnnnnnnnnnnnnnnnnnnnnnnnnnnnnnnnnnnnnnnnnnnnnnnnnnnnnnnnnnnnnnnnnnnnnnnnnnnnnnnnnnnnnnnnnnnnnnnnnnnnnnnnnnnnnnnnnnnnnnnnnnnnnnnnnnnnnnnnnnnnnnnnnnnnnnnnnnnnnnnnnnnnnnnnnnnnnnnnnnnnnnnnnnnnnnnnnnnnnnnnnnnnnnnnnnnnnnnnnnnnnnnnnnnnnnnnnnnnnnnnnnnnnnnnnnnnnnnnnnnnnnnnnnnnnnnnnnnnnnnnnnnnnnnnnnnnnnnnnnnnnnnnnnnnnnnnnnnnnnnnnnnnnnnnnnnnnnnnnnnnnnnnnnnnnnnnnnnnnnnnnnnnnnnnnnnnnnnnnnnnnnnnnnnnnnnnnnnnnnnnnnnnnnnnnnnnnnnnnnnnnnnnnnnnnnnnnnnnnnnnnnnnnnnnnnnnnnnnnnnnnnnnnnnnnnnnnnnnnnnnnnnnnnnnnnnnnnnnnnnnnnnnnnnnnnnnnnnnnnnnnnnnnnnnnnnnnnnnnnnnnnnnnnnnnnnnnnnnnnnnnnnnnnnnnnnnnnnnnnnnnnnnnnnnnnnnnnnnnnnnnnnnnnnnnnnnnnnnnnnnnnnnnnnnnnnnnnnnnnnnnnnnnnnnnnnnnnnnnnnnnnnnnnnnnnnnnnnnnnnnnnnnnnnnnnnnnnnnnnnnnnnnnnnnnnnnnnnnnnnnnnnnnnnnnnnnnnnnnnnnnnnnnnnnnnnnnnnnnnnnnnnnnnnnnnnnnnnnnnnnnnnnnnnnnnnnnnnnnnnnnnnnnnnnnnnnnnnnnnnnnnnnnnnnnnnnnnnnnnnnnnnnnnnnnnnnnnnnnnnnnnnnnnnnnnnnnnnnnnnnnnnnnnnnnnnnnnnnnnnnnnnnnnnnnnnnnnnnnnnnnnnnnnnnnnnnnnnnnnnnnnnnnnnnnnnnnnnnnnnnnnnnnnnnnnnnnnnnnnnnnnnnnnnnnnnnnnnnnnnnnnnnnnnnnnnnnnnnnnnnnnnnnnnnnnnnnnnnnnnnnnnnnnnnnnnnnnnnnnnnnnnnnnnnnnnnnnnnnnnnnnnnnnnnnnnnnnnnnnnnnnnnnnnnnnnnnnnnnnnnnnnnnnnnnnnnnnnnnnnnnnnnnnnnnnnnnnnnnnnnnnnnnnnnnnnnnnnnnnnnnnnnnnnnnnnnnnnnnnnnnnnnnnnnnnnnnnnnnnnnnnnnnnnnnnnnnnnnnnnnnnnnnnnnnnnnnnnnnnnnnnnnnnnnnnnnnnnnnnnnnnnnnnnnnnnnnnnnnnnnnnnnnnnnnnnnnnnnnnnnnnnnnnnnnnnnnnnnnnnnnnnnnnnnnnnnnnnnnnnnnnnnnnnnnnnnnnnnnnnnnnnnnnnnnnnnnnnnnnnnnnnnnnnnnnnnnnnnnnnnnnnnnnnnnnnnnnnnnnnnnnnnnnnnnnnnnnnnnnnnnnnnnnnnnnnnnnnnnnnnnnnnnnnnnnnnnnnnnnnnnnnnnnnnnnnnnnnnnnnnnnnnnnnnnnnnnnnnnnnnnnnnnnnnnnnnnnnnnnnnnnnnnnnnnnnnnnnnnnnnnnnnnnnnnnnnnnnnnnnnnnnnnnnnnnnnnnnnnnnnnnnnnnnnnnnnnnnnnnnnnnnnnnnnnnnnnnnnnnnnnnnnnnnnnnnnnnnnnnnnnnnnnnnnnnnnnnnnnnnnnnnnnnnnnnnnnnnnnnnnnnnnnnnnnnnnnnnnnnnnnnnnnnnnnnnnnnnnnnnnnnnnnnnnnnnnnnnnnnnnnnnnnnnnnnnnnnnnnnnnnnnnnnnnnnnnnnnnnnnnnnnnnnnnnnnnnnnnnnnnnnnnnnnnnnnnnnnnnnnnnnnnnnnnnnnnnnnnnnnnnnnnnnnnnnnnnnnnnnnnnnnnnnnnnnnnnnnnnnnnnnnnnnnnnnnnnnnnnnnnnnnnnnnnnnnnnnnnnnnnnnnnnnnnnnnnnnnnnnnnnnnnnnnnnnnnnnnnnnnnnnnnnnnnnnnnnnnnnnnnnnnnnnnnnnnnnnnnnnnnnnnnnnnnnnnnnnnnnnnnnnnnnnnnnnnnnnnnnnnnnnnnnnnnnnnnnnnnnnnnnnnnnnnnnnnnnnnnnnnnnnnnnnnnnnnnnnnnnnnnnnnnnnnnnnnnnnnnnnnnnnnnnnnnnnnnnnnnnnnnnnnnnnnnnnnnnnnnnnnnnnnnnnnnnnnnnnnnnnnnnnnnnnnnnnnnnnnnnnnnnnnnnnnnnnnnnnnnnnnnnnnnnnnnnnnnnnnnnnnnnnnnnnnnnnnnnnnnnnnnnnnnnnnnnnnnnnnnnnnnnnnnnnnnnnnnnnnnnnnnnnnnnnnnnnnnnnnnnnnnnnnnnnnnnnnnnnnnnnnnnnnnnnnnnnnnnnnnnnnnnnnnnnnnnnnnnnnnnnnnnnnnnnnnnnnnnnnnnnnnnnnnnnnnnnnnnnnnnnnnnnnnnnnnnnnnnnnnnnnnnnnnnnnnnnnnnnnnnnnnnnnnnnnnnnnnnnnnnnnnnnnnnnnnnnnnnnnnnnnnnnnnnnnnnnnnnnnnnnnnnnnnnnnnnnnnnnnnnnnnnnnnnnnnnnnnnnnnnnnnnnnnnnnnnnnnnnnnnnnnnnnnnnnnnnnnnnnnnnnnnnnnnnnnnnnnnnnnnnnnnnnnnnnnnnnnnnnnnnnnnnnnnnnnnnnnnnnnnnnnnnnnnnnnnnnnnnnnnnnnnnnnnnnnnnnnnnnnnnnnnnnnnnnnnnnnnnnnnnnnnnnnnnnnnnnnnnnnnnnnnnnnnnnnnnnnnnnnnnnnnnnnnnnnnnnnnnnnnnnnnnnnnnnnnnnnnnnnnnnnnnnnnnnnnnnnnnnnnnnnnnnnnnnnnnnnnnnnnnnnnnnnnnnnnnnnnnnnnnnnnnnnnnnnnnnnnnnnnnnnnnnnnnnnnnnnnnnnnnnnnnnnnnnnnnnnnnnnnnnnnnnnnnnnnnnnnnnnnnnnnnnnnnnnnnnnnnnnnnnnnnnnnnnnnnnnnnnnnnnnnnnnnnnnnnnnnnnnnnnnnnnnnnnnnnnnnnnnnnnnnnnnnnnnnnnnnnnnnnnnnnnnnnnnnnnnnnnnnnnnnnnnnnnnnnnnnnnnnnnnnnnnnnnnnnnnnnnnnnnnnnnnnnnnnnnnnnnnnnnnnnnnnnnnnnnnnnnnnnnnnnnnnnnnnnnnnnnnnnnnnnnnnnnnnnnnnnnnnnnnnnnnnnnnnnnnnnnnnnnnnnnnnnnnnnnnnnnnnnnnnnnnnnnnnnnnnnnnnnnnnnnnnnnnnnnnnnnnnnnnnnnnnnnnnnnnnnnnnnnnnnnnnnnnnnnnnnnnnnnnnnnnnnnnnnnnnnnnnnnnnnnnnnnnnnnnnnnnnnnnnnnnnnnnnnnnnnnnnnnnnnnnnnnnnnnnnnnnnnnnnnnnnnnnnnnnnnnnnnnnnnnnnnnnnnnnnnnnnnnnnnnnnnnnnnnnnnnnnnnnnnnnnnnnnnnnnnnnnnnnnnnnnnnnnnnnnnnnnnnnnnnnnnnnnnnnnnnnnnnnnnnnnnnnnnnnnnnnnnnnnnnnnnnnnnnnnnnnnnnnnnnnnnnnnnnnnnnnnnnnnnnnnnnnnnnnnnnnnnnnnnnnnnnnnnnnnnnnnnnnnnnnnnnnnnnnnnnnnnnntggaaacgggaatacgtataagaagccgacagcagcattctcagaacttctttgtgatgttgcattcaagtcacagaattggaacattccctttcacagagcgggtttgaaacactctatttgcagtgtctgtaagtggatctttggagcgctttccggcctaaggtgaaaaaggacatatcttcccataaaaaccagacagaagcattctcagaaacttactcgtgatgtgtgtcctcaactaatggagtagaacctttcttttgattgagcaattttgaaacactctttttgtagaatctgcaagtggatatttggatagctttgaggatttcattggaaacgggaatatattcatatgaaatctagacagaagaattctcagaaacttccttgtgatggttgcattcaaatcatggagttgaacattcgctttcatagagcaggttggaaacactctttttccattccctggaagtggacatttggagtgcttcgaggccaatggtgaaaaaggaaatatcttcccataaaaactagacagaagcattctcagaaacttatttgtgatgtatgtcctcaactaacagattagaacatttcttttgagagagcagttttgaaacactctttttgtggaatctgcaagtggatatttggctggctttgatgatttcgttggacacggaaatacatataaaaagcagacagcagcgttctgagaaacttcttggtgatgtttgcattcaagtcacagaatggaacgttccctttcatagaactgatttgaaactctccttttgtcgtatctggaagtgtccatttggagcgcattcaggcttgtgttgaaaaaggaaatatcttcccataaaaactagacagaagcattctcagcaacttgtttgtgatgtgtgccctctactaacagagttgaacctttcttttcatagagcagctttgaaacactctttttgtagaatctgcaggaggatatttgtatagatttgaggatttcgttggaaacgggattgtcttcagataaaatccagacagaagcactctcagaaacttttttgggatgtttgcattcacgtcacagaggagagcatgccttttcgtagagaagttttcaaacactgtttttgtagtatctggaagtggacatttggagcggtttcaggactatgttgaaaaagcaaatatcttcccgtaacaactggacagaagcattctcagaagctagcctctgatgtgtgtcctcaactatcagagttgaacatttctttagacagaacagttttgaaactctttttgtggagtctgcaagtggatatttggctagatttgaagatttcgttggaaacgtgagtacgtataaaaagcagaatgcagcattctcagaaacttctttgtgatgtttgcattcaagtcacagaaatgaacattccctttcacagagcaggtttgaaacactctttttgtagtgtctgtaagtggacctttggagcactttcaggcctaaggtgaaaaaggacatatcttcccataagaactagaaagaagcattctcaaaaacttactcgtgatgtgtgccctcaactaacggaatagaacctttcttttgatagaggagttttgaaacactctttttgtagaatctgcaagtggatatttgcatagctttgaggatttcgttggaaacgggaatatcttcatataaaatctagacagaagcattctcagaaacttccttgtgatggttgcattcaagtcactgagttgaacattcgctttcatagaggaggttggaaacactctttttcctttccctggaagtggacatttggagcgcttggaggcctatggtgaaaaagggagtgtcttcccatcaaaactagatagaagcattctcagaaacttatttgtgatgtgtgtcctcaactgacagagttgaacatttcttttgagagggcagttttgaaacactctttttgtggaatctgcaagtggatatttggctggctttgacgatttccttggaaacgggaatacatataaaaagcagacagcagcgttatgagaaactacttgttgatgtttgcattcaagtcacagaatggaacgttccctttcatagaacaggtttgaaacactccttttgtcgtatctggaagtgtccatttggatcgcattcaggcttgtgttgaaaaaggaaatatcttcccataaaaactagacagaagcattctcagcaacttgtttgtgatgtgtgacctctactaacagagttgaacctttcttttcatacagcagttttgaaacactctttttgtagaacctgcaggaggatatttgcatagctttgaggatttcgttggaaacgggattgtcttcagataaaatccagacagaagcattctcagaaacttccttgggatgtttgcatacaagtcacagaggagaacatgccctttcgtagagaaggtttgaaacactctctttgcagtatctggaagtggacatttggagcagtttcaggcctatgctgaaaaaggaaatatcttcccttaacaactggacagaagcattctcagaagctagtctctgatgtgtgtgctcaactaacagagttgaacatttcttttgacagaacagttttgaaacactctttttgtggagtctgcaagtggatatttggctaaatttttaggatttcgttggaaacgggattacatataaaaacccgtcagcagcattctcagaaacttctttgtgatgtttgcattcaagtcacagaattgaacattccctttcacagagcaggtttgaaacactctatttgtagtgtctgtaagtggacctttggagcgctttccggcctaaggtgaaaaaggacatatcttcccataaaaaccagacagaagcattctcagaaacttactcgtgatgtgtgtcctcaactaacggaatagaacctttcttttaatagagcagttttgaaacaatctttttgtagaatctgcatgtggatatttggatagctttgaggatttcattggaaacgggaatatcttcatataaaatctagacagaagcattctcagaaacttccttgtgatggttgcattaaagtcacagagttgaacattcggtttcatagagcaggttggaaacactctttttccattccctggaagtggacatttggagcgcttcgaggcctatggtgaaaaaggaattatcttcccataaaaactagacagaagcattctcagaaacttatttgtgatgtgtgtcctcaactaacagagttgaacatttcttttgagagagcagttttgaaacactctttttgtggaacctgcaagtggatatttggctggctttgacgatttcgttggaaacgggaatacatataaaaagcagacagcagcgttctgagaaacttcttggtgatgtttgcattcaagtcacagaatggaacgttccctttcatagaacaggtttgaaacacaccttttgtcgtatctgacagtgtccatttggagcgcattcaggcttctgtttaaaaaggaaatatcttcccataaaaacttgacagaatcatatgggaagataagagctttttcgccttaggccggaaagcgctccaaaggtccgcttacagacactacaaaaagagtgtttcaaaactgcactctgaaagggaatgttcaattcagagacttgagtgcaaacatcaaaaagaagtttctgcgaattgctgctgtcggctttttattcgtaatcccttttccaacgaaatcctcaaagctatccaaatatcaacttgcagatcctacaaaaagagtgtttcaaaactgctctatcaaaagaaaggttctactccgttagttgaggacacacatcacgagtaagtttctgagaatgcttatgtctaggttttatgggaagatatttcctttttcaccataggcctcgaagcgctccaaaagtccagttacagacactacaaaaagagtgtttcaaacctgctctgtgaaagggaatgttcaattctgagacttgaatgcaaacatcacaacgaagtttctgagaatgctgctgtctgctttttatacgtaatcccgtttccaacgaaatcctcaaatctagccaaatatccacttgcagactccacaaaaagagagtttcaaaacagttctgtctaaagaaatgttcaactctcttagttgaggacacacatcagagactagctcctgagaattcttctgtccagttgttacgggaagatatttcctttttcaacataatcttgaaaccgctccaaatgtccacttccagatactacaaaaagagtgtttcaaaccttctctacgaaagggcatgttctcctctgtgacttgtatgcaaatctcccaaagaagttgctgagaatgcttctgtctggattttatgtgaagacaatcccgtttccaaagaaatcctcaaatctatgcaaatattcaactgcagactctacaaacagagtgtttcaaaactgctctatgaaaagaaaggttcacctctcttagtagagggcacacagcacaaacaagttgctgagaatgcttctgtctagtttttatgggaagatatttcctttttcaacacaagcctgaatgcgctccaaagggacacttccagatacgacaaaaggagtgtttcaaacctgttctatgaaagggaacgttccattccgtgacttgaatgcaaacatcaccaagaagtttctcagaacgctgctgtctgctttttatatgtattcccgtttccaacgaaatcgtcaaagccagcaaaatatccacttgcagattccacaaaaagagagtttcaaaactgctctctcaaaagaaatattcaactgtgtcagttgaggacacacatcccaaagaagtttctgagaatgcttctgtctagtttttatgggaagatatttcctttttcaccataggcctcaaaccgctccacatgtccacttccagggaatggaaaaagagtgtttccaacctgctctatgaaagcgaatgttcaactccgtgacttgaatgcaaacatcacaaggaagtttctgagaatgcttctgtctagattttatatgaagatattcccgtttccaacgaaatcctcaaatctatccaaatatccgctttgagattctacaaaaagagtgtttcaaaactgctctatcaaaagaaaggttctactcccttagttgaggacacacatcgtgagtaagtttctgacaatgcttctgtctggtttttatgggaagatatgtcctttttcaccttaggccggaaagcgctccaaaagtccagttacagacactacaaaaagagtgtttcaaacctgctctgtgaaagggaatgttcaattctgtgacttgaatgcaaacatcacaaagaagttgctgagaatgctgctgtctgctttttataccttatcccgtttccaacgaaatcctcaaatctagccaaatatccacttgcagactccacaaaaacagtgtttcaaaactgtactgtcaaaagaaatgttctactctgttagttgaggacacacgtcagagactagcttctgagaatgcttctgtccagttgttaagggaagatatttccttttccaacataagcctgaaaccgcttcaaatgtccacttccagatactgcaaagagagtgtttcaaaccttctctacgaaagggcatgttctcctctgtgacgtcaatgcaaacatcccaaagaagtttctgagaatgcttctgtctggattttatctgaagacaatcccgtttccaaagaaatcctcaaagatatgcaaatatgctcctgcagattctacaaaaagagtgtttcaaaactgctctatgaaaagaaaggttcgactctgttagtagagggcacacatcccaaacaagttgccgagaatgattctgtctggtttttatgggaagatatttccttttccaacacaagcctgaatgtgctccaaatggacacttccagatacgacaaaaggagtgtttcaaagctgttctatgaaaggcaacgttccattgtgtgacttgaatgcaaacatcaccaagtagtttctcagaacgctgctgtctgctttttatatgtattcccgtgtccaacgaaatcgtcaaagccagccaaatatccacttgcaggttccacaaaaagagtgtttcaaaactgctctctcaaaagacatgttcaactctgtcagttgaggacacacatcacaaagaagtttctgagaatgcttctgtctagtttttatgggaagatatttcctttttcaccataggcctcaaagcgctccaaatgtccacttccagggaatggaaaaagagtgtttccaacctgctctatgaaagccaatgttcaactccgtgagttgaatgcaaccatcacaaggaagtttctgagaatgcttctgtctagattttatatgaagatattcccgtttccaacgaaatcctcaaagctatccaaatatccacttggagattctacaaaaagagtgtttcaaaactgctctatcaaaagaaaggttctactccgtcagttgaggacacacatctcgagtaaatttctgagaatgcttctgtctagttttcatgggaagatatgtcctttttcaccttaggccggaaagcgctccaaaagtccagttacagacactacaaaaagagtgtttcaaacctgctctgtgaaagggaatgttcaattctgtgacttgaatgcaaacatcacaaagaaattgctgagaatgctgctgtctgctttttataccttatcccgtttccaacgaaatcctcaaatccagccaaatatccacttgcagactccacaaaaagagtgtttcaaaactatactctccaaagaaatgttcaactctgttagttgaggacacacatcagagactagcttctgagaatgcttctgtccagttgttacgggaagatatttcctttttcaacataggcctgaaaccgcttcaaatgtccacttccagatactgcaaagagagtgtttcaaaccttctgtacgaaagggcatgttctcctcagtgacgtcaatgcaaacatcccaaagaagtttctgagaatgcttctgtctggattttatctgaagacaatcccgtttccaacgaaatcctcaaagatatgcaaatatgctcctgcagattctacaaaaagagtgtttcaaaactgctctatgaatagaaaggttcgactctgttagtagagggcacacatcacaaacaagttgccgagaaggcttctgtctggtttttatgggaagatatttccttttccaacacaagcctgaatgcgctccaaatggacacttccagatacgacaaaaggagtgtttcaaacctgttctgtgaaagggaacgttccattctgtgacttgaatgcaaacatcaccaagtagtttctcagaacgctgctgtctgctttttatatgtattcccgtttccaacgaaatcgtcaaagccagccaaatatccacttgcaggttccacagaaagagtgtttcagaactgctctctcaaaagacatgttcaactctgtcagttgaggacacacatcacaaagaagtttctgagaatgcttctgtctagtttttatgggaagatatttcctttttcaccataggcctcaaagcgctccaaatgtccacttccagggaatggaaaaagagtgtttccaacctgctctatgaaagccaatgttcaactccgtgacttgaatgcaaccatctcaaggaagtttctgagaatgcttctgtctaggttttatatgaagatattcccgtttccaacgaaatcctcaaagctatccaaatatccacttggagattctacaaaaagagtgtttcaaaactgctctatcaaaagaaaggttctactccgtcagttgaggacacacatcacgagtaagtttctgacaatgcttctgtctagtttttatgggaagatatgtcctttttcaccttaggccggagagcgctccaaaagtccagttacagacactacaaaaagagtgtttcaaacctgctctgtgaaagggaatgttcaattctgtgacttgaatgcaaacatcacaaagaaattgctgagaatgctgctgtctgctttttataccttatcccgtttccaacgaaatcctcaaatccagccaaatatccacttgcagactccacaaaaagagtgtttcaaaactatactctccaaagaaatgttcaactctgttagttgaggacacacatcagagactagcttctgagaatgcttctgtccagttgttacgggaagatatttcctttttcaacataggcctgaaaccgcttcaaatgtccacttccagatactgcaaagagagtgtttcaaaccttctgtacgaaagggcatgttctcctcagtcacgtcaatgcaaacatcccaaagaagtttctgagaatgcttctgtctggattttatctgaagacaatcccgtttccaacgaaatcctcaaagatatgcaaatatgctcctgcagattctacaaaaagagtgtttcaaaactgctctatgaatagaaaggttcgactctgttagtagagggcacacatcacaaacaagttgccgagaaggcttctgtctggtttttatgggaagatatttccttttccaacacaagcctgaatgcgctccaaatggacacttccagatacgacaaaaggagtgtttcaaacctgttctgtgaaagggaacgttccattctgtgacttgaatgcaaacatcaccaagtagtttctcagaacgctgctgtctgctttttatatgtattcccgtttccaacgaaatcgtcaaagccagccaaatatccacttgcaggttccacagaaagagtgttcagaactgctctctcaaaagacatgttcaactctgtcagttgaggacacacatcacaaagaagtttctgagaatgcttctgtctagtttttatgggaagatatttcctttttcaccataggcctcaaagcgctccaaatgtccacttccagggaatggaaaaagagtgtttccaacctgctctatgaaagccaatgttcaactccgtgacttgaatgcaaccatcacaaggaagtttctgagaatgcttctgtctaggttttatatgaagatattcccgtttccaacgaaatcctcaaagctatccaaatatccacttggagattctacaaaaagagtgtttcaaaactgctctatcaaaagaaaggttctactccgtcagttgaggacacacatcacgagtaagtttctgacaatgcttctgtctagtttttatgggaagatatgtcctttttcaccttaggccggaaagcgctccaaaagtccagttacagacactacaaaaagagtgtttcaaacctgctctgtgaaagggaatgttcaattctgtgacttgaatgcaaacatcacaaagaaattgctgagaatgctgctgtctgctttttataccttatcccgtttccaacgaatcctcaaatccagccaaatatccacttgcagactccacaaaaagagtgtttcaaaactatactctccaaagaaatgttcaactctgttagttgaggacacacatcagagactagcttctgagaatgcttctgtccagttgttacgggaagatatttcctttttcaacataggcctgaaaccgcttcaaatgtccacttccagatactgcaaagagagtgtttcaaaccttctctacgaaagggcatgttctcctcagtgacgtcaatgcaaacatcccaaagaagtttctgagaatgcttctgtctggattttatctgaagacaatcccgtttccaacgaaatcctcaaagctatgcaaatatgctcctgcagattctacaaaaagagtgtttcaaaactgctctatgaatagaaaggttcgactctgttagtagagggcacacatcacaaacaagttgccgagaaggcttctgtctggtttttatgggaagatatttccttttccaacacaagcctgaatgcgctccaaatggacacttccagatacgacaaaaggagtgtttcaaacctgttctgtgaaagggaacgttccattctgtgacttgaatgcaaacatcaccaagtagtttctcagaacgctgctgtctgctttttatatgtattcccgtttccaacgaaatcgtcaaagccagccaaatatccacttgcaggttccacagaaagagtgtttcagaactgctctctcaaaagacatgttcaactctgtcagttgaggacacacatcacaaagaagtttctgagaatgcttctgtctagtttttatgggaagatatttcctttttcaccataggcctcaatgcgctccaaatgtccacttccagggaatggaaaaagagtgtttccaacctgctctatgaaagccaatgttcaactccgtgacttgaatgcaaccatcacaaggaagtttctgagaatgcttctgtctaggttttatatgaagatattcccgtttccaacgaaatcctcaaagctatccaaatatccacttggagattctacaaaaagagtgtttcaaaactgctctatcaaaagaaaggttctactccgtcagttgaggacacacatcacgagtaagtttctgacaatgcttctgtctagtttttatgggaagatatgtcctttttcaccttaggccggaaagcgctccaaaagtccagttacagacactacaaaaagagtgtttcaaacctgctctgtgaaagggaatgttcaattctgtgacttgaatgcaaacatcacaaagaaattgctgagaatgctgctgtctgctttttataccttatcccgtttccaacgaaatcctcaaatccagccaaatatccacttgcagactccacaaaaagagtgtttcaaaactatactctccaaagaaatgttcaactctgttagttgaggacacacatcagagactagcttctgagaatgcttctgtccagttgttacgggaagatatttcctttttcaacataggcctgaaaccgcttcaaatgtccacttccagatactgcaaagagagtgtttcaaaccttctctacgaaagggcatgttctcctcagtgacgtcaatgcaaacatcccaaagaagtttctgagaatgcttctgtctggattttatctgaagacaatcccgtttccaacgaaatcctcaaagatatgcaaatatgctcctgcagattctacaaaaagagtgtttcaaaactgctctatgaatagaaaggttcgactctgttagtagagggcacacatcacaaacaagttgccgagaaggcttctgtctggtttttatgggaagatatttccttttccaacacaagcctgaatgcgctccaaatggacacttccagatacgacaaaaggagtgtttcaaacctgttctgtgaaagggaacgttccattctgtgacttgaatgcaaacatcaccaagtagtttctcagaacgctgctgtctgctttttatatgtattcccgtttccaacgaaatcgtcaaagccagccaaatatccacttgcaggttccacagaaagagtgttcagaactgctctnnnnnnnnnnnnnnnnnnnnnnnnnnnnnnnnnnnnnnnnnnnnnnnnnnnnnnnnnnnnnnnnnnnnnnnnnnnnnnnnnnnnnnnnnnnnnnnnnnnnagcattgtcagaaacttctttggaatgtgtgtactcaactaacagatttgaacctttcttttgatagagcagttttgaaacgctctttttgtagaatctgcaagaggatatttggatagctttgaggatttcgttgtaaaggggaatctcttcatatataagctatacagaagcattctcagaaacttcgttgggatgtttcgattgaagtcccagtgttgaacattcccttttatagagcaggttggaaacactctttctgcattccctggaagtggacatttggagcgctttcaggacgacggtgaaaatggaaatatcttccaagaaaatctagacagaagcaacgtcagaaacttttctgtgatggatctactcagctaacagagttgaacctttcttttgagagagcacttttgcaacactctttttgtggaatatgcaagtggatattagggcagctttgaggatttcgttggaaacgggaatacatgtaaaaagcagacagcagcattctcagcaaacttctttgtgatgtttgcattgaagtcacagagttgaacattccctttgagagagcaggttggaaacacgccttttgtcatatctggaagtgtccattcggagcgcattcaggcttgtgttgaaaaaggaaatatcctcccataaaaactagacagaagcattctcagaaacttatctgtgatgtatgtactcaactaacagaactaaaccatcgttttgaaggagcagttttgaaacactctttttgcggaatctgcaagtggatatttggctagctgggaggatttcgttggaaacgggattacatacaaaaagcagacagcagcattcccagaatcttgtttgtgatgtttgcattcaagtcacagagttgaacattccctttcagagagcaggtttgaaacactctttttatagtatctggatgtggacatttggagcgctttcaggcctatggtgaaaaaggaaatatcttctcctgaaaactagacagaagcattctcagaatcttatttgtgatgtgcgccctcaactagcagtgttgaaactttcttttgatagagcagttttgaaacactctttttgtaaaatctgcaagaggatatttggatagctttgaggatttcgttggaaacgggattgtcttcatataaaatctagacagaagcattctcaaaggcttcattgggatgtttcaactgaagtcacagtgttgaacagtccctttcatagagcaggtttgaaacactcttttggtagtatctggaagtggacatttggagcgctctcaggactgcggtgaaaaaggaattatcttccaataaaagctagatagaagcaatgtcagaacttttttcatgatgtatctactcagctaacagagttgaacctttcttttgagagagcagttttgaaacactctttttgtggaatatgcaagtgggtattaggccagcttggaggatttcgttggaaacgggaatacgtataaaaagcagacagcagcattgtcagaaactactttgtgatgtttgcattcaagtcacagaattgaacactccctttcacagagcaggtttgaaacactctttttgtagtgtctataagtgaacatttggcgtgctttcaggcctaacgtgaaaaaggaaatatcttcccataaaaactagacagaagcattctcagaaacttgtttgtgatgtgtgccctctactgacagagttgaacctttctttgcaaagaacagctttgaaacactctttttgtagaatctgcaagaggatatttggatagctttgaggatttcgttggaaacgggtatgtcttcagataaactctagacagaagcattctcagaaacttcttcgggatgttgcattcaagtcacagagtagaacattcccattcatagaggagatttgaaacactctttttgaagtatctggaagtggacatttggagcgctttcaggcctatgttgaaaaaggaaatatcttcccataaaaactagacggaagcattctcagaaacttatttgtgatgtgtttgctcaactaacaggattgaaccatcgttttgaaggagcagttttgaaacactgttttcgtggaatctgcaagtggatatttggctagctttgaggatttcgttggaaacgggattacatatacaaaggagacagcagcattctcagaaacttctttgtgatgtctgcattcaattcacagagttgagcattccctttcatagagcaggttggaaacactctttttgtagtatctggatgaggacatttggagcgctttcaggcgtatggtgaaaaaggaaatatcttcccgtaaaaactagacataagcattctcagaaatttatttgtgatgtgtgccctcaactaatagagttgaacctttcttttgatagagcagttttgaaacactctttttgtaaaatctgcaagaggatatttggaaagctttgaggatttcgttgcaaatgggaatggcttcatataaactctagacagaagcattctcagaaacttctttcggatgttgcgattgaagtcccagtgttgaacattcccttttatagcgcaggttggaaacactctttttgtagtatctggaagtggacatttggagcgctttcaggacgatggtgaaaatgggaatatcttccaaaaaaatctagatagaagcaatgtcagaaacttttctgtgatggatctactcagctaacagagttgaacctttcttttgagagagcagttttgcaacactctttttgtggaatatgcaagtggatattagggcagctttgaggatttcgttggaaacgggaatacatgtaaaaagcagacagcagcattctcagaaacttctttgtgatgtttgcattgaagtcacagagttgaacattccctttgagagagcaggtttgaaacacgccttttgtcatatctggaagtgtccattcggagcgcattcaggcttgtgttgaaaaaggaaaatatcctcccataaaaactagacagaagcattctcagaaacttatttgtgatgtatgtactcaactaacagaactaaaccatcgttttgaaggagcagttttgaaacactctttttgcggaatctgcaagtggatatttggctagcttggaggatttcgttagaaacgggattacatacaaaaagcagacagcagcattctcagaaacttctttgtgatgttagcattcaagtcacagagttgaacattccctttcatagagcaggtttgaaacactctttttgtagtatctggatgtggacattttgattgctttcaggcctatggtgaaaaaggatatatcttcccatgaaaactagactgaagcattctcagaaacttatttgtgatgtgtgccctcaactgacagtgttgaacctttgttttgatagagcagttctgaaaacactttttgtaaaatctgcaagaggatatttggatagctttgaggatttcgttggaaacgggaatgtcttcatgtaaactctagacagaagcattctcagaaactgctttgggatgtttcaattgaagtcccagtgttgaacattccctttcatagagcaggtttgaaacactctttttgtactatctggaagtggacatttggagcgctttcaggtctacggtgaaaaaggaaatatcttccaagaaaatctagatagaagcaatgtcagaacttttttcatgatgtatctacgcagcaaacagagttgaacctttcttttgagagagcagttttgaaacactctttttgtggaatatgcaagtgggtattaggccagcttggaggatttcgttggaaacgggaatacgtataaaaagcagacaggagcattgtgagaaacttctttgtgatgtttgcattcaagtcacagaattgaacactccctttcacagagcaggtttgaaacactctttttgtagtgtgtgtaagtgaacatttggactgctttcaggcctaaggtgaaaaaggaaatatcttcccataaaaactagacagaagcattctccgaaactcgtttgtgatatgtgccctctactgacggagttgaacctttctttgcaatgagcagttttgaaaccatctttttgtagaatctgcaagaggatatttggatagctttgaggatttcttgggaaacgggaatgtcttcagataaactctagacagcagcattctcagaaacttctttgggatgtttcaattgaagtcacagtgttgaacattccctttcacagagcaggtttgaaacactctttttgtagtgtctataattgaacatttggcgtactttcaggcctaacgtgaaaaaggaaatatcttcccataaaaactagacagaagcattctcagaaacttgtttgtgatgtgcgccctctactgacagagttgaacctttctttgcaaagagcagttttgaaacactctttttgtagaatctgcaggaggatatttggatagctttgaggatttcttgggaaacgggaatgtcttcagataaactctagacagaagcattctcaaaaacttctttgggatgattcaattgaagtcacagtgttgaacattccctttcacagagcaggtttgaaacactctttttgtggtgtctataagtgaacatttggcgtgatttcaggggtaacgtgaaaaaggaaatatcttcccataaaaactagacagaagcattctcagaaacttgttcatgatgtgtgccctctactgacagagttgaacctttctttgcaaagagcagctttgaaacactctttttgtagaatctgcaagaggatatttggatagcttggaggatttcgttggaaacgggtatgtcttcagataaactctagacagaagcattctcagaaacttctttgggatgttgcattcaagtcacagagtagaacattcccattcatagagcagatttgaaacactctttttgtagtatctggaagtggacatttggagcgctttcaggcctatgttgaaaaaggaaatatcttcccataaaaactagacggaagcattctcagaaacttatttgtgatgtgtgtactcaaataacagaattcaacaatcgttttgaaggagcagttttgaaacactctttttgtggaatctgcaagtgcatatttagctagatttgacgatttcgttggaaacgggattacatataaaaagcagacagcagcattctcagaaacttctttgtgatgtctgcattcaattcacagagttgagcattccctttcctagagcacgttggaaacactctttttgtagtatctggatgaggacatttggagcgctttcaggcgtatggtgaaaaaggaaatatcttcccgtaaaaactagacagaagcattctcagaaatttatttgggatgtgtgccctcaactaacagagttgaacctttcttttgatagagcagttttgaaacactctttttgtaaaatctgcaagaggatatttggatagctttgaggatttcgttgcaaacgggaatggcttcatataaactctagacagaagcattctcagaaacttctttgggatgtttcgattgaagtcccagtgttgaacattcccttttatagagcaggttggaaacactctttctgcattccctggaagtggacatttggagcgctttcaggacgacggtgaaaatggaaatatcttccaataaaatctagatagaagcaatgtcagaaacttttatgtgatggatctactcagctaacagagttgaacctttcttttgagagagcagttttgcaacactctttttgtggaatatgcaagtggatattagggcagctttgaggatttcgttggaaacgggaatacatgtaaaaagcagacagcagcgttgtgagaaacttctttgtgatgtttgcattcaagtcacagagttgaacgttccgtatcatagagcaggttggaaacatgccttttgtcatatctggaagtgtcaatttgaagcgcattcaaccttgtgttgaaaaaggaaataccttccaatagaaaccagacagaagcattctcagaaacttacttgtgatgtgtttgctcaactaacagaattgaaccatcgttttgaaggagcagttttgaaacactgttttcgtggaatctgcaagtggatatttggctagctttgaggatgtcgttggaaacgggaatacatataaaaaggagatagcagcattctcagaaacttctttgtgatgtctgcattcaagtcacagagttgagcattccctttcatagagcaggtttgagacactctttttgtagtatctagatgaggacatttggagcgctttcaggcgtatggtgaaaaaggaaatatcttcccgtaaaaactagacagaagcattctcaggaacttatttgtgatgtgtgccctcaactgacagtgttgaacctttgttttgatagagcagttctgaaacacactttttgtaaaatctgcaagaggatatttggatagctttgaggatttcgttggaaacgggaatgtcttcatgtaaactctagacagaagcattctcagaaactgctttgggatgtttcaattgaagtcacagtgttgaacactccctttcatagagcaggtttgaaacactctttttgtagtgtctataagtggacatttgtagggctttcaggtctacggtgaaaaaggagatatcttccaataaaaactagatagaagcaatgtgagaaactttatcatgatgtatctactcagccaacagatttgaacctttcttttgagagagcagttttgaaacactttttttggggaatatgcaagtggatgataggccagcttgaaggatttcgttggaaacgggaatacgtataaaaagcagacagcagcattgtcagaaactactttgtgatgtttgcattcaagtcacagaattgaacactccctttcacagagcaggtttgaaacactctttttgtagtgtctgtaagtgaacatttggattgctttcaggcctaaggtgaaaaaggaaatatcttcccataaaaactagacagaagcattctcagaaacttgtttgtgatgtgtgccctctactgacagagttgaaactttctttgcaaagagcagttttgaaacactctttttgtagaatctgcaagaggatatttggatagctttgaggatttcttgggaaacgggaatgtcttcagataaactctagacagaagcattctcagaaacttctttgggatgtttcaattgaagtcagtgttgaacattccctttcacagagcaggtttgaaacactctttttgtagtgtctatcagtgaacatttggcgtgctttcaggcgtaacgtgaaaaaggaaatatcttcccataaaaactagacagaagcattctcagaaacttgttcttgatgtgtcccctctactgacagagttgaacctttctttgcaaagagcagctttgaaacactctttttgtagaatctgcaagaggatatttggatagcttggaggatttcgttggaaacgggtatgtcttcagataaactctagacagaagcattctcagaaacttctttgggatgttgcattcaagtcacagagtagaacattcccattcatagagcagatttgaaacactctttttgtagtatctggaagtggacatttggagcgctttcaggcctatgttgaaaaaggaaatatcttcccataaaaactagacggaagcattctcagaaacttatttgtgatgtgtttgctcaactaacaggattgaaccatcgttttgaaggagcagttttgaaacactgttttcgtggaatctgcaagtggatatttggctagctttgaggatttcgttggaaacgggattacatataaaaaggagacagcagcattctcagaaacttctttgtgatgtctgcattcaattcacagagttgagcattccctttcatagagcagattggaaacactctttttgtagtatctggatgaggacatttggagcgctttcaggcctatggtgaaaaaggaaatatcttcccgtaaaaactagacagaagcattctcagaagtttatttgtgatgtgtgccctcaactaacagagttgaacctttcttttgatagagcagttttgaaacactctttttgtaaaatctgcaagaggatatttggatagctttgaggatttcgttgcaaacgagaatggcttcacataaactctagacagaagcattctcagaaacttcgttgggatgtttcgattgaagtcccagtgttgaacattcccttttatagagcaggttggaaacactctttctgctttccctggaagtggacatttggtgcgctttcaggacgacggtgaaaatggaaatatcttccaagaaaatctagatagaagcaacgtcagaaacttttctgtgatggatctactcagctaacagagttgaacctttcttttgagagagcagttttgcaacactctttttgtggaatatgcaagtggatattagggcagctttgaggatttcgttggaaacgggaatacatgtaaaaagcagacagcagcattctcagaaacttctttgtgatgtttgcattgaagtcacagagttgaacattccctttgagagagcaggtttgaaacacgccttttgtcatatctggaagtgtccattcggagcgcattcaggcttgtgttgaaaaaggaaatatcctcccataaaaactagacagaagcattctcagaaacttatctgtgatgtatgtactcaactaacagaactaaaccatcgttttgaaggagcagttttgaaacactctttttgcggaatctgcaagtggatatttggctagctgggaggatttcgttggaaacgggattacatacaaaaagcagacagcagcattctcagaaacttctttgtgatgtttgcattcaagtcacagagttgaacattccctttcatagaacaggtttgaaacactctttttgtagtatctggatgtggacatttggatcgctttcaggcctatggtgaaaaaggaaatatcttcccatgaaaactagacagaagcattctcagaaacttatttgtgatgtgtgccctcaactgacagtgttgaacctttgttttgatagagcagttctgaaacacactttttgtaaaatctgcaagaggatatttggatagctttgaggatttcgttggaaacgggaatgtcttcatgtaaactctagacagaagcattctcagaaactgctttgggatgtttcaattgaagtcccagtgttgaacattccctttcatagagcaggtttgaaacactctttttgtactatctggaagtggacatttggagcgctttcaggtctacggtgaaaaaggagatatcttccaataaaaactagatagaagcaatgtcagaacttttttcatgatgtatctactcagcaaacagagttgaacctttcttttgagggagcagttttgaaacactctttttgtggaatatgcaagtgggtattaggccagcttggaggatttcgttggaaacgggaatacgtataaaaagcagacagcagcattgtcagaaactactttgtgatgtttgcattcaagtcacagaattgaacactccctttcacagagcaggtttgaaacactctttttgtagtgtctgtaagtgaacatttggattgctttcaggcctaaggtgaaaaaggaaatatcttcccataaaaactagacagaagcattctcagaaacttgtttgtgatgtgtgccctctactgacagagttgaacctttctttgcaaagagcagttttgaaacactctttttgtagaatctgcaagaggatatttggatagctttgaggatttctttggaaacgggaatgtcttcagataaactctagacagaagcattctcagaaacttctttgggatgtttcaattgaagtcacagtgttgaacattccctttcacagagcaggtttgaaacactctttttgtagtgtctataagtgaacatttggcgtgctttcaggcctaacgtgaaaaaggaaatatcttcccataaaaactagacagaagcattctcagaaacttgttcgtgatgtgtgccctctactgacagagttgaacctttctttgcaaagaagcagctttgaaacacactttttgtagaatctgcaagaggatatttggaaagctttgaggatttcgttggaaacgggtatgtcttcagataaactctagacagaagcattctcagaaacttctttgggatgttgcatgcaagtcacagagtagaacattcccattcatagagcagatttgaaacactctttttgtagtatctggaagtggacatttggagcgctttcaggcctatgttgaaaaaggaaatatcttcccataaaaactagacggaagcattctcagaaacttacttgtgatgtgtttgctcaactaacagaattgaaccatcgttttgaaggagcagttttgaaacaatgttttcgtagaatctgcaagtggatatttggctagctttgaggatttcgttggaaacgggattacatataaaaaggagacagcagcattctcagaaacttctttgtgatgtctgcattcaattcacagagttgagcattccctttcatagagcaggttggaaacactctttttgtagtatctggatgagaacatttggagcgctttcaggcgtatggtgaaaaaggaaatatcttcccgtaaaaactagacagaagcattctcagaaatttatttgtgatgtgtgccctcaactaacagagttgaacctttcctttgatagagcagttttgaaacactctttttgtaaattctgcaagaggatatttggatagctttgaggatttcgttgcaaacgggaatggcttcatataaactctagacagaagcattctcagaaacttcgttgggatgtttcgattgcagtcccagtgttgaacattcccttttatagagcaggttggaaacactctttctgcattccctggaagtggacatttggagcgctttcaggacgacggtgaaaatggaaatatcttccaagaaaatctagatagaagcaatgtcagaaacttttctgtgatggatctactcagctaacagagttgaacctttcttttgagagagcagttttgcaacactctttttgtggaatatgcaagtgattattagggcagctttgaggatttcgttggaaacgggaatacatgtaaaaagcagacagcagcattctcagaaacttctttgtgatgtttgcattgaagtcacagagttgaacattccctttgagagagcaggtttgaaacacgccttttgtcatatctggaagtgtccattcggagcgcattcaggcttgtgttgaaaaaggaaatatcctcccataaaaactagacagaagcattctcagaaacttatctgtgatgtatgtactcaactaacagaactaaaccatcgttttgaaggagcagttttgaaacactctttttgcggaatctgcaagtggatatttggctagctgggaggatttcgttggaaacgggattacatacaaaaagcagacagcagcattctcatgaacttctttatgatgtttgcattcaagtcacagagtagaacattccctttcatagaacaggtttgaaacactctttttgtagtatctggatgtggacattttgatcgctttaaggcctatggtgaaaaacgaaatatcttcccatgaaaactagacagaagcattcccagaaacttatttgtgatgtgtgccctcaactgacagtgttgaacctttgttttgatagagcagttctgaaacacactttttgtaaaatctgcaagaggatatttggatagctttgaggatttcgttggaaacgggaatgtcttcatgtaaactctagacagaagcattctcagcaaactgctttgggatgtttcaattgaagtcccagtgttgaacattcccattcatagagcaggtttgaaacactctttttgtactatctggaagtggacatttggagcgctttcaggtctacggtgaaaaaggagatatcttccaataaaaactagatagaagcaatgtcagaacctttttcatgatgtatctactcagcaaacagagttgaacctttcttttgagagagcagttttgaaacactctttttgtggaatatgcaagtgggtattaggccaacttggaggatttcgttggaaacgggaatacgtataaaaagcagacagcagcattctcagaaacttctttgggatgtttcaattgaagtcagagtgttgaacattccctttcacagagcaggtttgaaacactctttttgtactgtctctaagtgaacatttggcgtgatttcaggcctaacatgaaaaaggaaatatctgcctataaaaactagacagaagcattctcagaaacttgtttgtgatgtgtgccctctactgacagagttgaacctttctttgcaaagagcagttttgaaaccttcttttggtagaatctacaagaggatatttggatagctttgagtatttcttgggaaacgggaatgtcttcagataaactctagacagaagcattctcagaaacttctttgggatgtttcaattgaagtcacagtgttgaacattccctttcacagagcaggtttgaaacactctttttgtagtgtctataagtgaacatttggcgtgctttcaggcctaacgtgaaaaaggaaatatcttcccataaaaactagacagaagcattctcagaaacttgttcgtgatgtgtgccctctactgacagagttgaacctttctttgcaaagagcagctttgaaacacactttttgtagaatctgcaagaggatatttggatagcttggaggatttcgttggaaacgggtatgtcttcagataaactctagacagaagcattctcagaaatttctttgggatgttgcatgcaagtcacagagtagaacattcccattcatagagcagatttgaaacactctttttgtagtatctggaagtggacatttggagcgctttcaggcctatgttgaaaaaggaaatatcttcccataaaaactagacggaagcattctcagaaacttatttgtgatgagtttgctcaactaacaggattgaaccatcgttttgaaggagcagttttgaaacactgttttcgtggaatctgcaagtggatatttggctagctttgaggatttcgttggaaacgggattacatataaaaaggagacagcagcattctcagaaactgctttgggatgttgcattcaagtcacagagttgagcattcccttttatagagcagttttgaaacactctctttgtagtatctggatgaggacatttggaacgctttcaggcgtatggtgaaaaaggaaatatcttcccgtaaaaactagacaaaaacattctcagaattttatttgtgatgtgtgctatcaacaaaccgagttgaacctttcttttgattgagcagttttgaaacactctttttgtaaaatctgcaagaggatatttggatagctttgaggatttcgttgcaaacgggaatggcttcttataaactctagacagaagcattctcagaaacttcgttgggatgtttcgattgaagtcccagtgttgaacattcccttttatagagcaggttggaaacactctttctgcattccctggaagtggacatttggagcgctttcaggacgacggtgaaaatggaaatatcttccaataaaatctagatagaagcaacgtcagaaacttttctgtgatggatctactcagctaacagagttgaacctttcttttgagagagcagttttgcaacactttttgtggaatatgcaagtggatattagggcagctttgaggatttcgttggaaacgggaatacatgtaaaaagcagacagcagcattctcagaaacttctttgtgatgtttgcattgaagtcacagagttgaacattccctttgagagagcaggtttgaaacacgccttttgtcatatctggaagtgtccattcggagcgcattcaggcttgtgttgaaaaaggaaatatcctcccataaaaactagacagaagcattctcagaaacttatctgtgatgtatgtactcaactaacagaactaaaccatcgttttgaaggaacagttttgaaacactctttttgcggaatctgcaagtggatatttggctagctgggaggatttcgttggaaacgggattacatacaaaaagcagacagcagcattctcagaaacttctttgtgatgtttgcattcaagtcacagagttgaaccttccctttcatagagcaggtttgaaacactctttttgtagtatctggatgtggacatttggatcgctttcaggcctatggtgaaaaaggaaatatcttcccatgaaaactagacagaagcattctcagaaacttatttgtgatgtgtgccctcaactgacagtgttgaacctttgttttgatagagcagttctgaaacacactttttgtaaaatctgcaagaggatatttggatagctttgaggatttcgttggaaacgggaatgtcttcatgtaaactctagacagaagcattctcagaaactgctttgggatgtttcaattgaagtcccagtgttgaacattccctttcatagagcaggtttgaaacactctttttgtactatctggaagtggacatttggagcgctttcaggtctacggtgaaaaaggagatatcttccaataaaaactagatagaagcaatgtcagaacttttttcatgatgtatctactcagcaaacagagttgaacctttcttttgggagagcagttttgaaacactctttttgtggaatatgcaagtgggtattaggccagcttggaggatttcgttggaaacgggaatacgtataaaaagcagacagcagcattgtcagaaactactttgtgatgtttgcattcaagtcacagaattgaacactccctttcacagagcaggtttgaaacactctttttgtagtgtctgtaagtgaacatatggattgctttcaggcctaaggtgaaaaaggaaatatcttcccataaaaactagacagaagcattctcagaaacttgtttgtgatgtgtgccctctactgacagagttgaacctttctttgcaaagaccagttttgaaacactctttttgtagaatctgcaagaggatatttggatagctttgaggatttcttgggaaacgggaatgtcttcagataaactctagacagaagcattctcagaaacttctttgggatatttcaattgaagtcacagtgttgaacattccctttcacagagcaggtttgaaacactctttttgtagtgtctataagtgaacatttggcgtgctttcaggcctaacgtgaaaaaggaaatatcttcccataaaaactagacagaagcattctcagaaacttgttcatgatgtgtgccctctactgacagagttgaacctttctttgcaaagagcagctttgaaacactctttttgtagaatctgcaagaggatatttggatagcttggaggatttcgttggaaacgggtatgtcttcagataaactctagacagaagcattctcagaaacttctttgggatgttgcattcaagtcacagagtagaacattcccattcatagagcagatttgaaacactctttttgtagtatctggaagtggacatttggagcgctttcaggcctatgttgaaaaaggaaatatcttcccataaaaactagacggaagcattctcagaaacttacttgtgatgtgtttgctcaactaacagaattgaaccatcgttttgaaggagcagttttgaaacactgttttcgtggaatctgcaagtggatatttggctagctttgaggatttcgttggaaacgggattacatataaaaaggagacagcagcattctcagaaacttctttgtgatgtctgcattcaattcacagagttgagcattccctttcatagagcaggttggaaacactctttttgtagtatctggatgaggacatttggagcgctttcaggcctatggtgaaaaaggaaatatcttcccgtaaaaactagacagaagcattctcagaaatttatttgtgatgtgtgccctcaactaacagagttgaacctttcttttgatagagcagttgtgaaacactctttttgtaaaatctgcaagaggatatttggatagctttgaggatttcattgcaaacgggaatggcttcatataaactctagacagaagcattctcagaaacttcgttgggatgtttcgattgaagtcccagtgttgaacattcccttttatagagcaggttggaaacactctttctgcattccctggaagtggacctttggagcgctttcaggacgacggtgaaaatggaaatatcttccaataaaatctagatagaagcaacgtcagaaacttttatgtgatggatctactcagctaacagagttgaacctttcttttgagagagcagttttgcaacactctttttgtggaatatgcaagtggatattagggcagctttgaggatttcgttggaaacgggaatacatgtaaaaaacagacagcagcattctcagaaacttctttgtgatgtttgcattgaagtcacagagttgaacattccctttgagagagcaggtttgaaacacgccttttgtcatatctggaagtgtccattcggagcgcattcaggcttgtgttgaaaaaggaaatatcctcccataaaaactagacagaagcattctcagaaacttatttgtgatgtatgtaatcaactaacagaactaaaccatcgttttgaaggagcagttttgaaacactctttttgcggaatctgcaagtggatatttggctagctgggaggatttcgttggaaacgggattacatacaaaaagcagacagcagcattctcagaaactcctttgtgatgtttgcattcaagtcacagagttgaacattccctttcatagagcaggattgaaaaactctttttgtagaatctggatgtggacatttggagtgctttcaggcctatgctgaaaaaggaaatatcttcccctgaaagctagacagaagcattctcagaaacttatttgtgatgtgtgccctcaactgacagtgttgaacctttgttttgatagagcagttctgaaaaacactttttgtaaaatctgcaagaggatatttggatagctttgaggatttcgttggaaacgggaatgtcttcatgtaaactctacacagaagcattctcagaaactgctttgggatgtttcaattgaagtcccagtgttgaacattccctttcatagagcaggtttgaaacactctttttgtgctatctggaagtggacatttggagcgctttcaggtctacggtgaaaaaggagatatcttccaataaaaactagatagaagcaatgtcagaacttttttcatgatgtatctactcagcaaacagagttgaacctttcttttgagagagcagttttgaaacactatttttgtggaatatgcaagtgggtattaggccagcttggaggatttcgttggaaacgggaatatgtataaaaagcagacagcggcattctcagaaacttctttgggatgtttcaattgaagtcacagtgttgaacattccgtttcacagagcaggtttgaaacactccttttgtagtgtctctaagtgaatatttggcgtgctttcaggcctaacgtaaaaaggaaatatcttcccataaaaactagacagaagaattatcaaaaacgtgtttgtgatgtgtgccctctactgacagagttgaacctttctttgcaaagagcagttttgaaaccctctttttgtagaatctgcaagaggatatttgcatagctttgagtatttcttgggaaacgggaatgtctttagataaactctagacagaagcattctcagaaacttctttgggatgtttcaattgaagtcacagtgttgaacattccctttcacagagcaggtttgaaacactctttttgtagtgtctataagtgaacatttggcgtgctttcaggcgtaacgtgaaaaaggaaatatcttcccataaaaactagacagaagcattctcagaaacttgttcttgatgtgtcccctctactgagagagttgaacctttctttgcaaagagcagctttgaaacactctttttgtagaatctgcaagaggatatttggatagcttggaggatttcgttggaaacgggtatgtcttcagataaactctagacagaagcattctcagaaacttctttgggatgttgcattcaagtcacagagtagaacattcccattcatagagcagatttgaaacactctttttgtagtatctggaagtggacatttggagcgctttcaggcctatgttgaaaaagcaaatatcttcccataaaaactagacggaagcattctcagaaacttatttgtgatgtgtttgctcaactaacaggattgaaccatcgttttgaaggagcagttttgaaacactgttttcgtggaatctgcaagtggatatttggctagctttgaggatttcgttggaaacgggattacatataaaaaggagacagcagcattctcagaaacttctttgtgatgtctgcattcaattcacagagttgagcattccctttcatagagcaggttggaaacactctttttgtagtatctggatgaggacatttggagcgctttcaggcgtatggtgaaaaaggaaatatcttcccgtaaaaactagacagaagcattctcagaagtttatttgtgatgtgtgccctcaactaacagagttgaacctttcttttgatagagcagttttgaaacactctttttgtaaaatctgcaagaggatatttggacagctttgaggatttcgttgcaaacgggaatggcttcatataaactctagacagaagcattctcagaaactgctttgggatgtttcaattgaagtcccagtgttgaacattccctttcatagagcaggttggaaacactctttctgcattccctggaagtggacaattggagcgcattcaggacgacggtgaaaatggaaatatcttccaagaaaatctagatagaagcaatgtcagaaacttttatgtgatggatctactcagctaacagagttgaagctttcttttgagagagcagttttgcaacactctttttgtggaatatgcaagtggatattagggcagctttgaggatttcgttggaaacgggaatacatgtaaaaagcagacagcagcattctcagaaacttctttgtgatgtttgcattgaagtcacagcagttgaacattccctttgagagagcaggtttgaaacacgccttttgtcatatctggaagtgtccattcggagcgcattcaggcttgtgttgaaaaaggaaatatcctcccataaaaactagacagaagcattctcagaaacttatctgtgatgtatgtactcaactaacagaactaaaccatcgttttgaaggagcagttttgaaacactctttttgcggaatctgcaagtggatatttggctagctgggaggatttcgttggaaacgggattacatacaaaaagcagacagcagcattctcagaaacttctttgtgatgttagcattcaagtcacagagttgaacattccctttcatagagcaggtttgaaacactctttttgtagtatctggatgtggacatttggatcgctttcaggcctatggtgaaaaaggaaatatcttcccatgaaaactagacagaagcattctcagaaacttatttgtgatgtgtgccctcaactgacagtgttgaacctttgttttgatagagcacttctgaaacacactttttgtaaaatctgcaagaggatatttggatagctttgaggatttctttggaaacgggaatgtcttcatgtaaactctacacagaagcattctcagaaacagctttgggatgtttcaattgaagtcccagtgttgaacattccctttcatagagcaggtttgaaacactctttttgtactatctggaagtggacatttggagcgctttcaggtctacggtgaaaaaggagatatcttccaataaaaactagatagaagcaatgtcagaacttttttcatgatgtatctactcagcaaacagagttgtacctttcttttgagagagcagttttgaaacactctttttgtggaatatgcaagtgggtattaggccagcttggaggatttcgttggaaacgggaatacgtataaaaagcagacagcagcattgtcagaaactactttgtgatgtttgcattcaagtcacagaactgaacactccctttcacagagcaggtttgaaacactctttttgtagtgtctgtaagtgaacatttggattgctttcaggcctaaggtgaaaaaggaaatatcttcccataaaaactagacagaagcattctcagaaacttgtttgtgatgtgtgccctctactgacagagttgaacctttctttgcaaagagcagttttgaaacactctttttgtagaatctgcaagaggatatttggatagctttgaggatttcttgggaaacgggaatgtcttcagataaactctagacagaagcatactcagaaacttctttgggacgtttcaattgaagtcacagtgttgaacattccctttcacagagcaggtttgaaacactctttttgtagtgtctataagtgaacatttggcgtgctttcaggcctaacgtgaaaaaggaaatatcttcccataaaaactagacagaagcattctcagaaacttgttcatgatgtgtgccctctactgacagagttgaacctttctttgcaaagagcagctttgaaacactcttttggtagaatctgcaagaggatatttggatagctttgaggatttcgttggaaacgggtatgtcttcagataaactctagacagaagcattctcagaaacttctttgggatgttgcattcaagtcacagagtagaacattcccattcatagagcagatttgaaacactctttttgtagtatctggaagtggacatttggagcgctttcaggcctatgttgaaaaaggaaatatcttcccataaaaactagacggaagcattctcagaaacttatttgtgatgtgtttgctcaactaacaggattgaaccatcgttttgaaggagcagttttgaaacactgttttcgtggaatctgcaagtggatatttggctagctttgaggatttcgttggaaacgggattacatataaaaaggagacagccagcattctcagaaacttctttgtgatgtttgcattcaattcacagagttgagcattccctttcatagagcaggttggaaacactctttttgtagtatctggatgtggacatttggatcgctttcaggcctatggtgaaaaaggaaatatcttcccatgaaaactagacagagcattctcagaaacttatttgtgatgtgtgccctcaactgacagtgttgaacctttgttttgatagagcagttctgaaacacactttttgtaaaatctgcaagaggatatttggatagctttgaggatttcgttggaaacgggaatgtcttcatgtaaactctagacagaagcattctcagaaactgctttgggatgtttcaattgaagtcccagtgttgaacattcccattcatagagcaggtttgaaacactctttttgtactatctggaagtggacatttggagcgctttcaggtctacggtgaaaaaggagatatcttccaataaaaactagatagaagcaatgtcagaacttttttcatgatgtatctactcagcaaacagagttgaacctttcttttgagagagcagttttgaaacactcctttgtggaatatgcaagtgggtattaggccagcttggaggatttcgttggaaacgggaatacgtataaaaagcagacagcagcattgtcagaaactactttgtgatgtttgcattcaagtcacagaattgaacactccctttcacagagcaggtttgaaaaactctttttgtagtgtctgtaagtgaacatttggattgctttcaggcctaaggtgaaaaaggaaatatcttcccataaaaactagacagaagcactctcagaaacttgtttgtgatgtgtgccctctactgacagagttgaacctttctttgcaaagagcagttttgaaacactccttttgtagaatctgcaagaggatatttggatagctttgaggatttcttgggaaacgggaatgtcttcagataaactctagacagaagcattctcagaaacttctttgggatgtttcaattgaagtcacagtgttgaacattccctttcacagagcaggtttgaaacactctttttgtagtgtctataagtgaacatttggcgtgctttcaggcctaacgtgaaaaaggaaatatcttcccataaaaactagacagaagcattctcagaaacttgttcttgatgtgtcccctctactgacagagttgaacctttctttgcaaagagcggctttgaaacactctttttgtagaatctgcaagaggatatttggatagcttggaggttttcgttggaaacgggtatgtcttcagataaactctagacagaagcattctcagaaacttctttgggatgttgcattcaagtcacagagtagaacattcccattcatagagcagatttgaaacactctttttgtagtatctggaagtggacatttggagcgctttcaggcctatgttgaaaaaggaaatatcttcccataaaaactagacggaagcattctcagaaacttacttgtgatgtgtttgctcaactaacagaattgaaccatcgttttgaaggagcagttttgaaacactgttttcgtgggatctgcaagtggatatttggctagctttgaggatttcgttggaaacgggattacatataaaaaggagacagcagcattctcagaaacttctttgtgatgtttgcgttcatgtcactgagttgaacattccctttcatagagcatgtttgaaacactctttttgtagtatctggaagtggacatttgaagagctttgaggcctatggtgaaaaagaaaatatcatcctttaaaaactagacagaaacactctcagaaacttttttgtgatgtgcgcactcaactaacagagatgaacttttcttttgatagagcagttttgaaacactctttttgtgggatctgcaagtggataattggatagctttgtggatttcgttggaaacgggagtctcttcataaaaattctagactgaagcattctcagaaacttcgttgggatgtttcgattgaagtcccagtgttgaacattcccttttatagagcaggttggaaacactctttctgcattccctggaagtggacatttggagcgctttcaggacgacggtgaaaatggaaatatcttccaagcaaaatctagatagaagcaacgtcagaaacttttatgtgatggatctactcagctaacagagttgaacctttcttttgagagagcagttttgcaacactctttttgtggaatatgcaagtggatattagggcagctttgaggatttcgttggaaacgggaatacatgtaaaaagcagacagcagcattctcagaaacttctttgtgatgtttgcattgaagtcacagagttgaacattccctttgagagagcaggtttgaaacacgccttttgtcatatctggaagtgtccattcggagcgcattcaggcttgtgttgaaaaaggaaatatcctcccataaaaactagacagaagcattctcagaaacttatctgtgatgtatgtactcaactaacagaactaaaccatcgttttgaaggagcagttttgaaacactctttttgcggaatctgcaagtggatatttggctagctgggaggatttcgttggaaacgggattacatacaaaaagcagacagcagcattctcagaaacttctttgtgatgtttgcattcaagtcacagagttgaacattccctttcatagagcaggtttgaaacactctttttgtagtatctggatgtggacatttggatcgctttcaggcctatggtgaaaaaggaaatatcttcccatgaaaactagacagaaacattctcagaaacttatttgtgatgtgtgccctcaactgacagtgttgaacctttgttttgatagagcagttctgaaacacactttttgtaaaatctgcaagaggatatttggatagctttgaggatttcgttggaaacgggaatgtcttcatgtaaactctagacagaagcattctcagaaactgctttgggatgtttcaattgaagtcccagtgttgaacattccctttcataggagcaggtttgaaacactctttttgtactatctggaagtggacatttggagcgctttcaggtctacggtgaaaaaggagatatcttccaataaaaactagatagaagcaatgtcagaacttttttcatgatgtatctactcagcaaacagagttgaacctttcttttgagagagcagttttgaaacactctttttgtggaatatgcaagtgggtattaggccagcttgaaggatttcgttggaaacgggattacgtataaaaagcagacagcagcattgtcagaaactactttgtgatgtttgcattcaagtcacagaattgaacactccctttcacagagcaggtttgaaacactctttttgtagtgtctggaagtgaacatttggattgctttcaggcctaaggtgaaaaaggaaatatcttcccataaaaactagacagaagcattctcagaaacttgtttgtgatgtgtgccctctactgacagagttgaacctttctttgcaaagagcagttttgaaacactctttttgtagaatctgcaagaggatatttggatagctttgaggatttcttgggaaacgggaatgtcttcagataaactctagacagaagcattctcagaaacttctttgggatgtttcaattgaagtcacagtgttgaacattccctttcacagagcaggtttgaaacagtctttttgtagtgtctataagtgaacatttggcgtgctttcaggcctaacgtgaaaaaggaaatctcttcccataaaaactagacagaagcattctcagaaacttgtttgtgatgtgtgccctctactgacagagttgaacctttctttgcaaagagcagctttgaaacactctttttgtagaatctgcaagaggatatttggatagctttgaggatttcgttggaaacgggtatgtcttcagataaactctagacagaagcattctcagaaacttctttgggatgttgcattcaagtcacagagtagaacattcccattcatagagcagatttgaaacactctttttgtagtatctggaagtggacatttggagcgctttcaggcctatgttgaaaaaggaaatatcttcccataaaaactagacggaagcattctcagaaacttacttgtgatgtgtttgctcaactaacagaattgaaccatcgttttgaaggagcagttttgaaacactgttttcgtggaatctgcaagtggatatttggctagctttgaggatttcgttggaaacgggattacatataaaaaggagacagcagcattctcagaaacttctttgtgatgtttgcattcaagtcacagagttgaacattccctttcatagagcaggtttgaaacactctttttgtagtatgtggaagtggacatttggagcgcttggaggcctatggtgaaaaggaaatatcttcccgtaaaaactagacagaaaaaaatttaccctaaaacttaaagtataataaaaaaataaaaaaataaaacttaaaaaaacgaagaaaatataacaaataacatgtttaactatataacaaaccttcacatgtaccctcaaacataaaataaaagtttcaaaagaagaaaatataacaaacacatgtgagatgtgtgtgtatgcatgtatctacatgattatgtatgtatacatatgtgtatacatatatgtatgtatacacatgtgtagacgtgtatatgtatatatacacatgtgtagacatatatatgtatatatacacacatgcagatacatacatacatatacacgtatctttgtatgttcttgtttccatatttcctcctcctttatataaaggatagcatattcttaaaaaaaaaaaactgctctatcaaaagaaaggttcaactctgttagttgagtaaacacatcacaaacaagtttctgacaatacttcnnnnnnnnnnnnnnnnnnnnnnnnnnnnnnnnnnnnnnnnnnnnnnnnnnnnnnnnnnnnnnnnnnnnnnnnnnnnnnnnnnnnnnnnnnnnnnnnnnnnagcattctcagaaacttcgttgggatgtttcgattgaagtcccagtgttgaacattcccttttatagagcaggttggaaacactctttctgcattccctggaagtggacatttggagcgctttcaggacgacggtgaaaatggaaatatcttccaagaaaatctagatagaagcaatgtcagaaacttttatgtgatggatctactcagctaacagagttgaacctttcttttgagagagcagttttgcaacactctttttgtggaatatgcaagtggatattagggcagctttgaggatttcgttggaaacgggaatacatgtaaaaagcagacagcagcattctcagaaacttctttgtgatgtttgcattgaagtcacagagttgaacattccctttgagagagcaggtttgaaacacgccttttgtcatatctggaagtgtccattcggagcgcattcaggcttgtgttgaaaaaggaaatatcctcccataaaaactagacagaagcattctcagaaacttatctgtgatgtatgtactcaactaacagaactaaaccatcgttttgaaggagcagttttgaaacactctttttgcggaatctgcaagtggatatttggctagctgggaggatttcgttggaaacgggattacatacaaaaagcagacagcagcattctcagaaactactttgtgatgtttgcattcaagtcacagagttgaacattccctttcatagagcaggtttgaaacactctttttgtagtatctggatgtggacatttggatcgctttcaggcctatggtgaaaaaggaaatatcttcccatgaaaactagacagaagcattctcagaaacttatttgtgatgtgtgccctcaactgacagtgttgaacctttgttttgatagagcagttctgaaacacactttttgtaaaatctgcaagaggatatttggatagctctgaggatttcgttggaaacgggagtgtcttcatgtaaactctagacagaagcattctcagaaacttctttgtgatgtttgcattcaagtcacagagttgaacattccctttcatagagcaggtttgaaacactctttttgtagtatctggaagtggacatttagagcgttctcaggactacggtgaaaaaggaaatatcttccaataaaagctagatagaagcaatgtcagaaactttttcatgatatatctactcagctaacagagttcaacctttcttttgagagagcagttttaaaacagtctttttgtggaatatgcaagtggatattaagccagcttggaggatttcgttggaaacgggaatccatataaaatgcagacagcagcattgtcagaaactactttgtgatgtttgcattcaagtcacagaattgaacactccctttcacagagcaggtttgaaacactctttttgtagtgtctgtaagtgaacatttggattgctttcaggcctaaggtgaaaaaggaaatatcttcccataaaaactagacagaagcattctcagaaacttgtttgtgatgtgtgccctctactgacagagttgaacctttctttgcaaagagcagttttgaaacactctttttgtagaatctgcaagaggatatttggatagctttgaggatttcttgggaaacgggaatgtcttcagataaactctagacagaagcattctcagaaacttctttgggatgtttcaattgaagtcacagtgttgaacattccctttcacagagcaggtttgaaacactctttttgtagtgtctataagtgaacatttggcgtgctttcaggcgtaacgtgaaaaaggaaatatcttcccataaaaactagacagaagcattctcagaaacttgttcgtgatgtgtgccctctactgacagagttgaacctttctttgcaaagagcagctttgaaacactctttttgtagaatctgcaagaggatatttggatagcttggaggatttcgttggaaacgggtatgtcttcagataaactctagacagaagcattctcagaaacttcttcgggatgttgcatgcaagtcacagagtagaacattcccattcatagagcagatttgaaacactctttttgtagtatctggaagtggacatttggagcgctttcaggcctatgttgaaaaaggaaatatcttcccataaaaactagacggaagcattctcagaaacttatttgtgatgtgtttgctcaactaacaggattgaaccatcgttttgaaggagcagttttgaaacactgttttcgtggaatctgcaagtggatatttggctagctttgaggatttcgttggaaacgggattacatataaaaaggagacagcagcattctcagaaacttctttgtgatgtctgcattcaattcacagagttgagcattccctttcatagagcaggttggaaacactctttttgtagtatctggatgaggacatttggagcgctttcaggcgtatggtgaaaaaggaaatatcttcccgtaaaaactagacagaagcattctcagaagtttatttgtgatgtgtgccctcagctaacagagttgaacctttcttttgatagagcagttttgaaacactctttttgtaaaatctgcaagaggatatttggatagctttgaggatttcgttgcaaacgggaatggcttcatataaactctagacagaagcattctcagaaacttcgttgggatgtttcgattgaagtcccagtgttgaacattcccttttatagagcaggttggaaacactctttctgcattccctggaagtggacatttggagcgctttcaggacgacggtgaaaatggaaatatcttccaagaaaatctagatagaagcaatgtcagaaacttttatgtgatggatctactcagctaacagagttgaacctttcttttgagagagcagttttgcaacattctttttgtggaatatgcaagtggatattagggcagctttgaggatttcgttggaaacgggaatacatgtaaaaagcagacagcagcattctcagaaacttctttgtgatgtttgcattgaagtcacagagttgaacattccctttgagagagcaggttggaaacacgccttttgtcatatctggaagtgtccattcggagcgcattcaggcttgtgttgaaaaaggaaatatcctcccataaaaactagacagaagcattctcagaaacttatctgtgatgtatgtactcaactaacagaactaaaccatcgttttgaaggagcagttttgaaacactctttttgcggaatctgcaagtggatatttggctagctgggaggatttcgttggaaacgggattacatacaaaaagcagacagcagcattctcagaaacttctttgtgatgtttgcattcaagtcacagagttgaacattccctttcatagagcaggtttgaaacactctttttgtagtatctggatgtggacatttggatcgctttcaggcctatggtgaaaaaggaaatatcttcccatgaaaactagacagaagcattctcagaaacttatttgtgatgtgtgccctcaactgacagtgctgaacctttgttttgatagagcagttctgaaacacactttttgtaaaatctgcaagaggatatttggatagctttgaggatttcgttggaaacgggaatgtcttcatgtaaactctagacagaagcattctcagaaactgctttgggatgtttcaattgaagtcccagtgttgaacattcccattcatagagcaggtttgaaacactctttttgtactatctggaagtggacatttggagcgctttcaggtctacggtgaaaaaggagatatcttccaataaaaactagatagaagcaatgtcagaacttttttcatgatgtatctactcagcaaacagagttgaacctttcttttgagagagcagttttgaaacactctttttgtggaatatgcaagtgggtattaggccagcttggaggatttcgttggaaacgggaatacgtataaaaagcagacagcagcattgtcagaaactactttgtgatgtttgcattcaagtcacagaattgaacactccctttcacagagcaggtttgaaacactctttttgtagtgtctgtaagtgaacatatggattgctttcaggcctaacgtgaaaaaggaaatatcttcccataaaaactagacagaagcattctcagaaacttgtttgtgatgtgtgccctctactgacagagttgaacctttctttgcaaagagcagttttgaaacactctttttgtagaatctgcaagaggatatttggatagctttgaagatttcttgggaaacgggaatgtcttcagataaactctagacagaagcattctcagaaacttctttgggatgtttcaattgaagtcacagtgttgaacattccctttcacagagcaggtttgaaacactctttttgtagtgtctataagtgaacatttggcgtgctttcaggcctaacgtgaaaaaggaaatatcttcccataaaaactagcacagaagcattctcagaaacttgttcgtgatgtgtgccctctactgacagagttgaacctttctttgcaaagagcagctttgaaacactctttttgtagaatctgccagaggatatttggatagctttgaggatttcgttggaaacgggtatgtcttcagataaactctagacagaagcattctcagaaacttctttgggatgttgcattcaagtcacagagtagaacattcccatgcatagagcagatttgaaacactctttttgtagtatctggaagtggacatttggagcgctttcaggcctatgttgaaaaaggaaatatcttcccataaaaactagacggaagcattctcagaaacttacttgtgatgtgtttgctcaactaacagaattgaaccatcgttttgaaggagcagttttgaaacactgttttcgtggaatctgcaagtggatatttggctagctttgaggatttcgttggaaacgggattacatataaaaaggagacagcagcattctcagaaacttctttgtgatgtctgcattcaagtcacagagttgagcattccctttcatagagcaggttggaaacactctttttgtagtatctggatgaggacatttggagcgctttcaggcgtatggtgaaaaaggaaatatcttcccgtaaaaactagacagaagcattctcagaaatttatttgtgatgtgtgccctcaactaacagagttgaacctttcttttgatagagcagttttgaaacactgtttttgtaaaatctgcaagaggatatttggatagctttgaggatttcgttgcaaacgggaatggcttcatataaactctagacagaagcattctcagaaacttcgttgggatgtttcgattgaagtcccagtgttgaacattcccttttatagagcaggttggaaacactctttctgcattccctggaagtggacatttggagcgctttcaggacgacggtgaaaatggaaatatcttccaagaaaatctagatagaagcaatgtcagaaacttttatgtgatggatctactcagctaacagagttgaacctttcttttgagagagcagttttgcaacactctttttgtggaatatgcaagtggatattagggcagctttgaggatttcgttggaaacgggaatacatgtaaaaagcagacagcagcattctcagaaacttctttgtgatgtttgcattgaagtcacagagttcaacattccctttgagagagcaggtttgaaacacgccttttgtcatatctggaagtgtccattcggagcgcattcaggcttgtgttgaaaaaggaaatatcctcccagaaaaactagacagaagcattctcagaaacttatctgtgatgtatgtactcaactaacagaactaaaccatcgttttgaaggagcagttttgaaacactctttttgcggaatctgcaagtggatatttggctagctgggaggatttcgttggaaacgggattacatacaaaaagcagacagcagcattctcagaaacttctttgtgatgtttgcattcaagtcacagagttgaacattccctttcatagagcaggtttgaaacactctttttgtagtatctggatgtggacatttggatccctttcaggcctatggtgaaaaaggaaatatcttcccatgaaaactagacagaagcattctcagaaacttatttgtgatgtgtgccctcaactgacagtgttgaacctttgttttgatagagcagttctgaaacacactttttgtaaaatctgcaagaggatatttggatagctttgaggatttcgttggaaacgggaatgtcttcatgtaaactctagacagaagcattctcagaaactgctttgggatgtttcaattgaagtcccagtgttgaacattcccattcatagagcaggtttgaaacactctttttgtactatctggaagtggacatttggagcgctttcaggtctacggtgaaaaaggagatatcttccaataaaaactagatagaagcaatgtcagaacttttttcatgatgtatctactcagcaaacagagttgaacctttcttttgagagagcagttttgaaacactctttttgtggaatatgcaagtgggtattaggccagcttggaggatttcgttggaaacgggaatacgtataaaaagcagacagcagcattgtcagaaactactttgtgatgtttgcattcaagtcacagaattgaacactccctttcacagagcaggtttgaaacactctttttgtagtgtctgtaagtgaacatttggattgctttcaggcgtaaggtgaaaaaggaaatatcttcccataaaaactagacagaagcattctcagaaacttgtttgtgatgtgtgccctctactgacagagttgaacctttctttgcaaagagcagttttgaaacactctttttgtagaatctgcaagaggatatttggatagctttgaggatttcttgggaaacgggaatgtcttcagataaactctagacagaagcattctcagaaacttctttgggatgtttcaattgaagtcacagtgttgaacattccctttcacagagcaggtttgaaacactctttttgaagtgtctataagtgaacatttggcgtgctttcaggcctaacgtgaaaaaggaaatatcttcccataaaaactagacagaagcattctcagaaacttgttcgtgatgtgtgccctctactgacagagttgaacctttctttgcaaagagcagctttgaaacactctttttgtagaatctgcaagaggatatttggatagcttggaggatttcgttggaaacgggtatgtcttcagataaactctagacagaagcattctcagaaacttctttgggatgttgcattcaagtcacagagtagaacattcccattcatagagcagatttgaaacactctttttgtagtatctggaagtggacatttggagcgctttcaggcctatgttgaaaaaggaaatatcttcccataaaaactagacggaagcattctcagaaacttatttgtgatgtgtttgctcaactaacaagattgaaccatcgttttgaaggagcagttttgaaacactgttttcgtggaatctgcaagtggatatttggctagctttgaggatttcgttggaaacgggattacatataaaaaggagacagcagcattctcagtaaacttctttgtgatgtttgcattcaattcacagagttgagcattccctttgatagagcaggttggaaacactctttttgtagtatctggatgtggacatttggatcgctttcaggcctatggtgaaaaaggaaatatcttcccatgaaaactagacagaagcattctcagaaacttatttgtgatgtgtgccctcaactgacagtgttgaacctttgttttgatagagcagttctgaaacacactttttgtaaaatctgcaagaggatatttggatagctttgaggatttcgttggaaacgggaatgtcttcatgtaaactctagacagaagcattctcagaaactgctttgggatgtttcaattgaagtcccagtgttgaacattccctttcatagagcaggtttgaaacactctttttgtactatctggaagtggacatttggagcgctttcaggtctacggtgaaaaaggagatatcttccaataaaaactagatagaagcaatgtcagaacttttttcatgatgtatctactcagcaaacagagttgaacctttcttttgagagagcagttttgaaacactctttttgtggaatatgcaagtgggtattaggccagcttggaggatttcgttggaaacgggaatacgcataaaaagcagacagcagcattgtcagaaactactttgtgatgtttgcattcaagtcacagaattgaacactccctttcacagagcaggtttgaaacactctttttgtagtgtctgtaagtgaacatttggattgctttcaggcctaaggtgaaaaaggaaatatcttcccataaaaactagacagaagcattctcagaaacttgtttgtgatgtgtgccctctactgacagagttgaacctttctttgcaaagagcagttttgaaacactctttttgtagaatctgcaagaggatatttggatagctttgaggatttcttgggaaacgggaatgtcttcagataaactctagacagaagcattctcagaaacttctttgggatgtttcaattgaagtcacagtgttgaacattccctttcacagagcaggtttgaaacactctttttgtagtgtctataattgaacatttggcgtgctttcaggcctaacgtgaaaaaggaaatatcttcccataaaaactagacagaagcattctcagaaacttgttcgtgatgtgtgccctctactgacagagttgaacctttctttgcaaagagcagctttgaaacactctttttgtagaatctgcaagaggatatgtggatagatttgaggatttcgttggaaacgggtatgtcttcagataaactctagacagaagcattctcagaaacttctttgggatgtttcaattgaagtcacagtgttgaacattccctttcacagagcaggtttgaaacactctttttgtagtgtctataagtgaacatttggcgtgctttcaggcctaacgtgaaaaaggaaatatcttcccataaaaactagacagaagcattctcagaaacttgttcgtgatgtgtgccctctactgacagagttgaacctttttttgcaaagagcagctttgaaacactctttttgtagaatctgcaagaggatatttggatagctttgaggatttcgttggaaacgggtatgtcttcagataaactctagacagaagcattctcagaaacttctttgggatgttgcattcaagtcacagagtagaacattcccattcatagagcagatttgaaacactctttttgtagtatctggaagtggacatttggagcgctttcaggcctatgttgaaaaaggaaatatcttcccataaaaactagacggaagcattctcagaaacttacttgtgatgtgtttgctcaactaacagaattgaaccatcgttttgaaggagcagttttgaaacactgttttcgtggaatctgcaagtggatatttggctagctttgaggatttcgttggaaacgggattacatatacaaaggagacagcagcattctcagaaacttctttgtgatgtctgcattcaattcacagagttgagcattccctttcatagagcaggttggaaacactctttttgtagtatctggatgaggacatttggagcgctttcaggcgtatggtgaaaaaggaaatatcttcccgtaaaaactagacagaagcattctcagaaatttatttgtgatgtgtgccctcaactaacagagttgaacctttctttcgatagagcagttttgaaacactctttttgtaaaatctgcaagaggatatttggatagctttgaggatttcgttgcaaacgggaatggcttcatataaactctagacagaagcattctcagaaacttcgttgggatgtttcgattgaagtcccagtgttgaacattcccttttatagagcaggttggaaacactctttctgcattccctggaagtggacatttggagcgctttcaggacgacggtgaaaatggaaatatcttccaataaaatctagatagaagcaacgtcagaaacttttctgtgatggatctactcagctaacagagttgaacctttcttttgagagagcagttttgcaacactctttttgtggaatatgcaagtggatattagggcagctttgaggatttcgttggaaacgggaatacatgtaaaaagcagacagcagcattctcagaaacttctttgtgatgtttgcattgaagtcacagagttgaacattccctttgagagagcaggtttgaaacacgccttttgtcatatctggaagtgtccattcggagcgcattcaggcttgtgttgaaaaaggaaatatcctcccataaaaactagacagaagcattctcagaaacttatctgtgatgtatgtactcaactaacagaactaaaccatcgttttgaaggagcagttttgaaacacttttttgcggaatctgcaagtggatatttggctagctgggaggatttcgttggaaacgggattacatacaaaaagcagacagcaagcattctcagcaaacttatttgtgatgtgtgccctcaactgacagtgttgaacctttgttttgatagagcagttttgaaacacactttttgtaaaatctgcaagaggatatttggatagctttgaggatttcgttggaaacgggaatgtcttcatgtaaactctagacagaagcattctcagaaactgctttgggatgtttcaattgaagtcccagtgttgaacattcccattcatagagcaggtttgaaacactctttttgtactatctggaagtggacatttggagcgctttcaggtctacggtgaaaaaggagatatcttccaataaaaactagatagaagcaatgtcagaacttttttcatgatgtatctactcagctaacagagttgaacctttcttttgagagagcagttttgaaacactctttttgtggaatatgcaagtgggtattaggccagcttggaggatttcgttggaaacgggaatacgtataaaaagcagacagcagcattgtcagaaactactttgtgatgtttgcattcaagtcacagaattgaacactccctttcacagagcaggtttcaaacactctttttgtagtgtctataagtgaacatttggcgtgctttcaggcctaaggtgaaaaaggaaatatcttcccataaaaactagacagannnnnnnnnnnnnnnnnnnnnnnnnnnnnnnnnnnnnnnnnnnnnnnnnnnnnnnnnnnnnnnnnnnnnnnnnnnnnnnnnnnnnnnnnnnnnnnnnnnngccgggagcagtggctgacacctgtaatcccaacactttgggatgatggcgggtggatcacttggggccgggagttcccggccagccaggccgacatggaaaatctttgcctctacaaaaaaaactgaacttttggattggtttcgggcctaaggtgaaaaaggaaatatcttcccataaaaactagacagaagagcattctcagaaacttctttgggatgtttcaattgaagtcacagtgttgaacattccctttcacagagcaggttttaaacactctttttgtagtgtctataattgaacatttggcgtgctttcaggcctaacgtgaaaaaggaaatatcttcccataaaaactagacagaagcattctcagaaacttgttcgtgatgtgtgccctctactgacagagttgaacctttctttgcaaagagcagctttgaaacactctttttgtagaatctgcaagaggatatgtggatagctttgaggatttcgttggaaacgggtatgtcttcagataaactctagacagaagcattctcagaaacttctttgggatgtttcaattgaagtcacagtgttgaacattccctttcacagagcaggtttgaaacactctttttgtagtgtctataagtgaacatttggcgtgctttcaggcgtaacgtgaaaaaggaaatatcttcccataaaaaccagacagaagcattctcagaaacttgtttgtgatgtgtgccctctactgacagagttgaacctttctttgcaaagagcagctttgaaacactctttttgtagaatctgcaagaggatatgtggatagctttgaggatttcgttggaaacgggtatgtcttcagataaactctagacagaagcattctcagaaacttctttgggatgtttcaattgaagtcacagtgttgaacattccctttcacagagcaggtttgaaacactctttttgtagtgtctataagtgaacatttggcgtgctttcaggcctaacgtgaaaaaggaaatatcttcccataaaaactagacagaagcattctcagaaacttgttcatgatgtgtgccctctactgacagagttgaacctttctttgcaaagagcagctttgaaacactctttttgtagaatctgcaagaggatatttggatagctttgaggatttcgttggaaacgggtatgtcttcagataaactctagacagaagcattctcagaaacttctttgggatgttgcattcaagtcacagagtagaacattcccattcatagagcagatttgaaacactctttttgtagtatctggaagtggacatttggagcgctttcaggcctatgttgaaaaaggaaatatcttcccataaaaactagacggaagcattctcagaaacttacttgtgatgtgtttgctcaactaacagaattgaaccatcgttttgaaggagcagttttgaaacactgttttcgtggaatctgcaagtggatatttggctagctttgaggatttcgttggaaacgggattacatataaaaaggagacagcagcattctcagaaacttctttgtgatgtctgcattcaagtcacagagttgagcattccctttcatagagcaggttggaaacactctttttgtagtatctggatgaggacatttggagcgctttcaggcgtatggtgaaaatggaaatatcttcccgtaaaaactagacagaagcattctcagaattttatttgtgatgtgtgccctcaagtaacagagttgaacctttcttttgatagagcagttttgaaacactctttttgtaaaatctgcaagaggatatttggatagctttgaggatttcgttgcaaacgggaatggcttcatataaactctagacagaagcattctcagaaacttcgttgggatgtttcgattgaagtcccagtgttgaacattcccttttatagagcaggttggaaacactctttctgcattccctggaagtggacatttagagcgctttcaggacgacggtgaaaatggaaatatcttccaagaaaatctagatagaagcaaccgtcagaaacttttctgtgatggatctactcagctaacagagttgaacctttcttttgagagagcagttttgcaacactctttttgtggaatatgcaagtggatattagggcagctttgaggatttcgttggaaacgggaatacatgtaaaaagcagacagcagcattctcagaaacttctttgtgatgtttgcattgaagtcacagagttgaacattccctttgagagagcaggtttgaaacacgccttttgtcatatctggaagtgtccattcggagcgcattcaggcttgtgttgaaaaaggaaatatcctcccataaaaactagacagaagcattctcagaaacttatctgtgatgtatgtactcaactaacagaactaaaccatcgttttgaaggagcagttttgaaacactctttttgcggaatctgcaagtggatatttggctagctgggaggatttcgttggaaacgggattacatacaaaaagcagagagcagcattctcagaaacttctttgtgatgtttgcattcaagtcacagagttgaacattccctttcatagagcaggtttgaaacactctttttgtagtatctggatgtggacatttggatcgctttcaggcctatggtgaaaaaggaaatatcttcccatgaaaactagacagaagcattctcagaaacttatttgtgatgtgtgccctcaactgacagtgttgaacctttgttttgatagagcagttctgaaacacactttttgtaaaatctgcaagaggatatttggatagctttgaggatttcgttggaaacgggaatgtcttcatgtaaactctagacagaagcattctcagaaactgctttgggatgtttcaattgaagtcccagtgttgaacattccctttcatagagcaggtttgaaacactctttttgtactatctggaagtggacatttggagcgctttcaggtctacggtgaaaaaggagatatcttccaataaaaactagatagaagcaatgtcagaacttttttcatgatgtatctactcagcaaacagagttgaacctttcttttgagagagcagttttgaaacactctttttgtggaatatgcaagtgggtattaggccagcttggaggatttcgttggaaacgggaatacgtataaaaagcagacagcagcattgtcagaaactactttgtgatgtttgcattcaagtcacagaattgaacactccctttcacagagcaggtttgaaacactctttttgtagtgtctgtaagtgaacatttggattgctttcaggcctaaggtgaaaaaggaaatatcttcccataaaaactagacagaagcattctcagaaacttgtttgtgatgtgtgccctctactgacagagttgaacctttctttgcaaagagcagttttgaaacactctttttgtagaatctgcaagaggatatttggatagctttgaggatttcttgggaaacgggaatgtcttcagataaactctagacagaagcattctcagaaacttctttgggatgtttcaattgaagtcacagtgttgaacattccctttcacagagcaggtttgaaacactctttttgtagtgtctataagtgaacatttggcgtgctttcaggcctaacgtgaaaaaggaaatatcttcccataaaaactagacagaagcattctcagaaacttgttcgtgatgtgtgccctctactgacagagttgaacctttctttgcaaagagcagctttgaaacacactttttgtagaatctgcaagaggatatttggatagcttggaggatttcgttggaaacgggtatgtcttcagataaactctagacagaagcattctcagaaacttctttgggatgttgcattcaagtcacagagtagaacattcccattcatagagcagatttgaaacactctttttgtagtatctggaagtggacatttggagcgctttcaggcctatgttgaaaaaggaaatatcttcccataaaaactagacggaagcattctcagaaacttatttgtgatgtgtttgctcaactaacaggattgaaccatcgttttgaaggagcagttttgaaacactgttttcgtggaatctgcaagtggatatttggctagctttgaggatttcgttggaaacgggattacatataaaaaggagacagcagcattctcagaaacttctttgtgatgtctgcattcaagtcacagagttgagcattccctttcatagagcaggttggaaacactctttttgtagtatctggatgaggacatttggagcgctttcaggcgtatggtgaaaaaggaaatatcttcccgtaaaaactagacagaagcattctcagaaatttatttgtgatgtgtgccctcaactaacagagttgaacctttcttttgatagagcagttttgaaacactctttttgtaaaatctgcaaagaggatatttggatagctttgaggatttcattgcaaacgggaatggcttcatataaactctagacagaagcattctcagaaacttcgttgggatgtttcgattgaagtcccagtgttgaacattcccttttatagagcaggttggaaacactctttctgcattccctggaagtggacctttggagcgctttcaggacgacggtgaaaatggaaatatcttccaataaaatctagatagaagcaacgtcagaaacttttatgtgatggatctactcagctaacagagttgaacctttcttttgagagagcagttttgcaacactctttttgtggaatatgcaagtggatattagggcagctttgaggatttcgttggaaacgggaatacatgtaaaaagcagacagcagcattctcagaaacttctttgtgatgtttgcattgaagtcacagagttgaacattccctttgagagagcaggtttgaaacacgccttttgtcatatctggaagtgtccattcggagcgcattcaggcttgtgttgaaaaaggaaatatcctcccataaaaactagacagaagcattctcagaaacttatctgtgatgtatgtactcaactaacagaactaaaccatcgttttgaaggagcagttttgaaacactctttttgcggaatctgcaagtggatatttggctagctgggaggatttcgttggaaacgggattacatacaaaaagcagacagcagcattctcagaaacttctttgtgatgtttgcattcaagtcacagagttgaacattccctttcatagagcaggtttgaaacactctttttgtagtatctggatgtggacatttggatcgctttcaggcctatggtgaaaaaggaaatatcttcccatgaaaactagacagaagcattctcagaaacttatttgtgatgtgtgccctcaactgacagtgttgaacctttgttttgatagagcagttctgaaacacactttttgtaaaatctgcaagaggatatttggatagctttgaggatttcgttggaaacgggaatgtcttcatgtaaactctagacagaagcattctcagaaactgctttgggatgtttcaattgaagtcccagtgttgaacattcccattcatagagcaggtttgaaacactctttttgtactatctggaagtggacatttggagcgctttcaggtctacggtgaaaaaggagatatcttccaataaaaactagatagaagcaatgtcagaacttttttcatgatgtatctactcagcaaacagagttgaacctttcttttgagagagcagttttgaaacactctttttgtggaatatgcaagtgggtattaggccagcttggaggatttcgttggaaacgggaatacgtataaaaagcagacagcagcattgtcagaaactactttgtgatgtttgcattcaagtcacagaattgaacactccctttcacagagcaggtttgaaacactctttttgtagtgtctgtaagtgaacttttggattgctttcaggcctaaggtgaaaaaggaaatatcttcccataaaaactagacagaagcattctcagaaacttgtttgtgatgtgtgccctctactgacagagttgaacctttctttgcaaagagcagttttgaaacactctttttgtagaatctgcaagaggatatttggatagctttgaggatttcttgggaaacgggaatgtcttcagataaactctagacagaagcattctcagaaacttctttgggatgtttcaattgaagtcacagtgttgaacattccctttcacagagcaggtttgaaacactctttttgtagtgtctataagtgaacatttggcgtgctttcaggcctaacgtgaaaaaggaaatatcttcccataaaaactagacagaagcattctcagaaacttgttcgtgatgtgtgccctctactgacagagttgaacctttctttgcaaagagcagctttgaaacacactttttgtagaatctgcaagaggatatttggatagctttgaggatttcgttggaaacgggtatgtcttcagataaactctagacagaagcattctcagaaacttctttgggatgttgcattcaagtcacagattagaacattcccattcatagagcagatttgaaacactctttttgtagtatctggaagtggacatttggagcgctttcaggcctatgttgaaaaaggaaatatcttcccataaaaactagacggaagcattctcagaaacttatttgtgatgtgtttgctcaactaacaggattgaaccatcgttttgaaggagcagttttgaaacactgttttcgtggaatctgcaagtggatatttggctagctttgaggatttcgttggaaacggcattacatatacaaaggagacagcagcattctcagaaacttctttgtgatgtctgcattcaagtcacagagttgagcattccctttcatagagcaggttggaaacactctttttgtagtatctggatgaggacatttggagcgctttcaggcctatggtgaaaaaggaaatatcttcccgtaaaaactagacagaagcattctcagaaatttatttgtgatgtgtgccctcaactaacagagttgaacctttcttttgatagagcagttttgaaacactctttttgtaaaatctgcaagaggatatttggatagctttgaggatttcgttgcaaacgggaatggcttcatataaactctagacagaagcattctcagaaacttcgttgggatgtttcgattgaagtcccagtgttgaacattcccttttatagagcaggttggaaacactctttctgcattccctggaagtggacatttggagcgctttcaggacgacggtgaaaatggaaatatcttccaagaaaatctagatagaagcaacgtcagaaacttttctgtgatggatctactcagctaacagagttgaacctttcttttgagagagcagttttgcaacactctttttgtggaatatgcaagtggatattagggcagctttgaggatttcgttggaaacgggaatacatgtaaaaagcagacagcagcattctcagaaacttctttgtgatgtttgcattgaagtcacagagttgaacattccctttgagagagcaggtttgaaacacgccttttgtcatatctggaagtgtccattcggagcgcattcaggcttgtgttgaaaaaggaaatatcctcccataaaaactagacagaagcattctcagaaacttatctgtgatgtatgtactcaactaacagaactaaaccatcgttttgaaggagcagttttgaaacactctttttgcggaatctgcaagtggatatttggctagctgggaggatttcgttggaaacgggattacatacaaaaagcagacagcagcattctcagaaacttctttgtgatgtttgcattcaagtcacagagttgaacattccctttcatagagcaggtttgaaacactctttttgtagtatctggatgtggacatttggatcgctttcaggcctatggtgaaaaaggaaatatcttccccatgaaaactagacagaagcattctcagaaacttatttgtgatgtgtgccctcaactgacagtgttgaacctttgttttgatagagcagttctgaaacacactttttgtaaaatctgcaagaggatatttggatagctttgaggatttcgttggaaacgggaatgtcttcatgtaaactctacacagaagcattctcagaaactgctttgggatgtttcaattgaagtcccagtgttgaacattcccattcatagagcaggtttgaaacactctttttgtaatatctggaagtggacatttggagcgctttcaggtctacggtgaaaaaggagatatcttccaataaaaactagatagaagcaatgtcagaacttttttcatgatgtatctactcagctaacagagttgaacctttcttttgagagagcagttttgaaacactctttttgtggaatatgcaagtgggtattaggccagcttggaggatttcgttggaaacgggaatacgtataaaaagcagacagcagcattgtcagaaactactttgtgatgtttgcattcaagtcacagaattgaacactccctttcacagagcaggtttgaaacactctttttgtagtgtctgtaagtgaacatatggattgctttcaggcctaaggtgaaaaaggaaatatcttcccataaaaactagacagaagcattctcagaaacttgtttgtgatgtgtgccctctactgacagagttgaacctttctttgcaaagagcagctttgaaacactctttttgtagaatctgcaagaggatatgtggatagctttgaggatttcgttggaaacgggtatgtcttcagataaactctagacagaagcattctcagaaacttctttgggatgtttcaattgaagtcacagtgttgaacattccctttcacagagcaggtttgaaacactctttttgtagtgtctataagtgaacatttggcgtgctttcaggcctaacgtgaaaaaggaaatatcttcccataaaaactagacagaagcattctcagaaacttgttcatgatgtgtgccctctactgacagagttgaacctttctttgcaaagagcagctttgaaacactctttttgtagaatctgcaagaggatatttggatagctttgaatatttctttggaaacgggtatgtcttcagataaactctagacagaagcattctcagaaacttctttgggatgttgcattcaagtcacagagtagaacattcccattcatagagcagatttgaaacactctttttgtagtatctggaagtggacatttggagcgctttcaggcctatgttgaaaaaggaaatatcttcccataaaaactagacggaagcattctcagaaacttatttgtgatgtgtttgctcaactaacaggattgaaccatcgttttgaaggagcagttttgaaacactgttttcgtggaatctgcaagtggatatttggctagctttgaggatttcgttggaaacgggattacatataaaaaggagacagcagcattctcagaaacttctttgtgatgtctgcattcaattcacagagttgagcattccctttcatagagcaggttggaaacactctttttgtagtatctggatgaggacatttggagcgctttcaggcgtatggtgaaaaaggaaatatcttcccgtaaaaactagacagaagcattctcagaagtttatttctgatgtgtgccctcaactaacagagttgaacctttcttttgatagagcagttttgaaacactctttttgtaaaatctgcaagaggatatttggatagctttgaggatttcgttgcaaacgggaatggcttcatataaactctagacagaagcattctcagaaacttcgttgggatgtttcgattgaagtcccagtgttgaacattcccttttatagagcaggttggaaacactctttctgcattccctggaagtggacatttggagcgctttcaggacgacggtgaaaatggaaatatcttccaagaaaatctagatagaagcaacgtcagaaacttttctgtgatggatctactcagctaacagagttgaacctttcttttgagagagcagttttgcaacactctttttgtggaatatgcaagtggatattagggcagctttgaggatttcgttggaaacgggaatacatgtaaaaagcagacagcagcattctcagaaacttctttgtgatgtttgcattgaagtcacagcagttgaacattccctttgagagagcaggtttgaaacacgccttttgtcatatctggaagtgtccattcggagcgcattcaggcttgtgttgaaaaaggaaatatcctcccataaaaactagacagaagcattctcagaaacttatctgtgatgtatgtactcaactaacagaactaaaccatcgttttgaaggagcagttttgaaacactctttttgcggaatctgcaagtggatatttggctagctgggaggatttcgttggaaacgggattacatacaaaaagcagacagcagcattctcagaaacttctttgtgatgtttgcattcaagtcacagagttgaacattccctttcatagagcaggtttgaaacactctttttgtactatctggatgtggacatttggatcgctttcaggcctatggtgaaaaaggaaatatcttcccatgaaaactagacagaagcattctcagaaacttatttgtgatgtgtgccctcaactgacagtgttgaacctttgttttgatagagcagttctgaaacacactttttgtaaaatctgcaagaggatatttggatagctttgaggatttcgttggaaacgggaatgtcttcatgtaaactctagacagaagcattctcagaaactgctttgggatgtttcaattgaagtcccagtgttgaacattccctttcatagagcaggtttgaaacactctttttgtactatctggaagtggacatttggagcgctttcaggtctacggtgaaaaaggagatatcttccaataaaaactagatagaagcaatgtcagaacttttttcatgatgtatctactcagcaaacagagttgaacctttcttttgagagagccgttttgaaacactctttttgtggaatatgcaagtgggtattaggccagcttggaggatttcgttggaaacgggaatacgtataaaaagcagacagcagcattgtcagaaactactttgtgatgtttgcattcaagtcacagaattgaacactccctttcacagagcaggtttgaaacacactttttgtagtgtctgtaagtgaacatttggattgctttcaggcctatggtgaaaaaggaaatatcttcccataaaaactagacagaagcattgtcagaaactactttgtgatgtttgcattcaagtcacagaattgaacactccctttcaaagagcaggtttgaaacactctttttgtagtgtctgtaagtgaacatatggattgctttcaggcctaaggtgaaaaaggaaatatcttcccataaaaactagacagaagcattctcagaaacttctttgggatgtttcaattgaagtcacagtgttgaacattccctttcacagagcaggtttgaaacactctttttgtagtgtgtataagtgaacatttggcgtgctttcaggcctaacgtgaaaaaggaaatatcttcccataaaaactagacagaagcattctcagaaacttgttcgtgatgtgtgccctctactgacagagttgaacctttctttgcaaagagcagctttgaaacactctttttgtagaatctgccagaggatatttggatagctttgaggatttcgttggaaacgggtatgtcttcagataaactctagacagaagcattctcagaaacttctttgggatgttgcattcaagtcacagagtagaacattcccattcatagagcagatttgaaacactctttttgtagtatctggaagtggacatttggagcgctttcaggcctatgttgaaaaaggaaatatcttcccataaaaactagacggaagcattctcagaaacttacttgtgatgtgtttgctcaactaacagaattgaaacatcgttttgaaggagcagttttgaaacactgttttcgtggaatctgcaagtggatatttggctagctttgaggatttcgttggaaacgggattacatataaaaaggagacagcagcattctcagaaacttctttgtgatgtctgcattcaattcacagagttgagcattccctttcatagagcaggttggaaacactctttttgtagtatctggatgaggacatttggagcgctttcaggcgtatggtgaaaaaggaaatatcttcccgtaaaaactagacagaagcattctcagaagtttatttgtgatgtgtgccctcaactaacagagttgaacctttcttttgatagagcagttttgaaacactctttttgtaaaatctgcaagaggatatttggatagctttgaggatttcgttgcaaacgggaatggcttcatataaactctagacagaagcattctcagaaacttcgttgggatgtttcgattgaagtcccagtgttgaacattcccttttatagagcaggttggaaacactctttctgcattccctggaagtggacatttggagcgctttcaggacgacggtgaaaatggaaatatcttccaagaaaatctagatagaagcaatgtcagaaacttttatgtgatggatctactcagctaacagagttgaacctttcttttgagagagcagttttgcaacactctttttgtggaatatgcaagtggatattagggcagctttgaggatttcgttggaaacgggaatacatgtaaaaagcagacagcagcattctcagaaacttctttgtgatgtttgcattgaagtcacagagttgaacattccctttgagagagcaggtttgaaacacgccttttgtcatatctggaagtgtccattcggagcgcattcaggcttgtgttgaaaaaggaaatatcctcccataaaaactagacagaagcattctcagaaacttatctgtgatgtatgtactcaactaacagaactaaaccatcgttttgaaggagcagttttgaaacactctttttgcggaatctgcaagtggatatttggctagctgggaggatttcgttggaaacgggattacatacaaaaagcagagagcagcattctcagaaacttctttgtgatgtttgcattcaagtcacagagttgaacattccctttcatagagcaggtttgaaacactctttttgtagtatctggatgtggacatttggatcgctttcaggcctatggtgaaaaaggaaatatcttcccatgaaaactagacagaagcattctcagaaacttatttgtgatgtgtgccctcaactgacagtgttgaacctttgttttgatagagcagttctgaaacacactttttgtaaaatctgcaagaggatatttggatagctttgaggatttcgttggaaacgggaatgtcttcatgtaaactctagacagaagcattctcagaaactgctttgggatgtttcaattgaagtcccagtgttgaacattccctttcatagagcaggtttgaaacactctttttgtactatctggaagtggacatttggagcgctttcaggtctacggtgaaaaaggagatatcttccaataaaaactagatagaagcaatgtcagaacttttttcatgatgtatctactcagcaaacagagttgaacctttcttttgagagagcagttttgaaacactctttttgtggaatatgcaagtgggtattaggccagcttggaggatttcgttggaaacgggaatacgtataaaaagcagacagcagcattgtcagaaactactttgtgatgtttgcattcaagtcacagaattgaacactccctttcacagagcaggtttgaaacactctttttgtagtgtctgtaagtgaacatttggattgctttcaggcctaaggtgaaaaaggaaatatcttcccataaaaactagacagaagcattctcagaaacttgtttgtgatgtgtgccctctactgacagagttgaacctttctttgcaaagagcagttttgaaacactctttttgtagaatctgcaagaggatatttggatagctttgaggatttcttgggaaacgggaatgtcttcagataaactctagacagaagcattctcagaaacttctttgggatgtttcaattgaagtcacagtgttgaacattccctttcacagagcaggtttgaaacactctttttgtagtgtctataagtgaacatttggcgtgctttcaggcctaacgtgaaaaaggaaatatcttcccataaaaactagacagaagcattctcagaaacttgttcgtgatgtgtgccctctactgacagagttgaacctttctttgcaaagagcagctttgaaacactctttttgtagaatctgcaagaggatatttggatagcttggaggatttcgttggaaacgggtatgtcttcagataaactctagacagaagcattctcagaaacttctttgggatgttgcattcaagtcacagagtagaacattcccattcatagagcagatttgaaacactctttttgtagtatctggaagtggacatttggagcgctttcaggcctatgctgaaaaaggaaatatcttcccataaaaactagacggaagcattctcagaaacttatttgtgatgtgtttgctcaactaacaggattgaaccatcgttttgaaggagcagttttgaaacactgttttcgtggaatctgcaagtggatatttggctagctttgaggatttcgttggaaacgggattacatataaaaaggagacagcagcattctcagaaacttctttgtgatgtctgcattcaattcacagagttgagcattccctttcatagagcaggttggaaacactctttttgtagtatctggatgaggacatttggagcgctttcaggcgtatggtgaaaaaggaaatatcttcccgtaaaaactagacagaagcattctcagaagtttatttgtgatgtgtgccctcaactaacagagttgaacctttcttttgatagagcagttttgaaacactctttttgtaaaatctgcaagaggatatttggatagatttgaggatttcgttgcaaacgggaatggcttcatagaaactctagacagaagcattctcagaaacttcgttgggatgtttcgattgaagtcccagtgttgaacattcccttttatagagcaggttggaaacactctttctgcattccctggaagtggacatttggagcgctttcaggacgacggtgaaaatggaaatatcttccaagaaaatctagatagaagcaatgtcagaaacttttatgtgatggatctactcagctaacagagttgaacctttcttttgagagagcagttttgcaacactctttttgtggaatatgcaagtggatattagggcagctttgaggatttcgttggaaacgggaatacatgtaaaaagcagacagcagcattctcagaaacttctttgtgatgtttgcattgaagtcacagagttgaacattccctttgagagagcaggtttgaaacacgccttttgtcatatctggaagtgtccattcggagcgcattcaggcttgtgttgaaaaaggaaatatcctcccataaaaactaggacggaagcattctcagaaacttatctgtgatgtatgtactcaactaacagaactaaaccatcgttttgaaggagcagttttgaaacactctttttgcggaatctgcaagtggatatttggctagctgggaggatttcgttggaaacgggattacatacaaaaagcagacagcagcattctcagaaacttctttgtgatgtttgcattcaagtcacagagttgaacattccctttcatagagcaggtttgaaacactctttttgtagtatctggatgtggacatttggatcgctttcaggcctatggtgaaaaaggaaatatcttcccatgaaaactagacagaagcattctcagaaacttctttgtgatgtgtgccctcaactgacagtgttgaacctttgttttgatagagcagttctgaaacacactttttgtaaaatctgcaagaggatatttggatagctttgaggatttcgttggaaacgggaatgtcttcatgtaaactctacacagaagcattctcagaaactgctttgggatgtttcaattgaagtcccagtgttgaacattcccattcatagagcaggtttgaaacactctttttgtactatctggaagtggacatttggagcgctttcaggtctacggtgaaaaaggagatatcttccaataaaaactagatagaagcaatgtcagaacttttttcatgatgtatctactcagcaaacagagttgaacctttcttttgagagagcagttttgaaacactctttttgtggaatatgcaagtgggtattaggccagcttggaggatttcgttggaaacgggaatacgtataaaaagcagacagcagcattgtcagaaactactttgtgatgtttgcattcaagtcacagaattgaacactccctttcacagagcaggtttgaaacactctttttgtagtgtctgtaagtgaacatatggattgctttcaggcctaaggtgaaaaaggaaatatcttcccataaaaactagacagaaagcattctcagaaacttgtttgtgatgtgtgccctctactgacagagttgaacctttctttgcaaagagcagttttgaaacactctttttgtagaatctgcaagaggatatttggatagctttgaagatttcttgggaaacgggaatgtcttcagataaactctagacagaagcattctcagaaacttctttgggatgtttcaattgaagtcacagtgttgaacattccctttcacagagcaggtttgaaacactctttttgtagtgtctataagtgaacatttggcgtgctttcaggcctaacgtgaaaaaggaaatatcttcccataaaaactagacagaagcattctcagaaacttgttcatgatgtgtgccctctactgacagagttgaacctttctttgcaaagagcagctttgaaacactctttttgtagaatctgcaagaggatatttggatagcttggaggatttcgttggaaacgggtatgtcttcagataaactctagacagaagcattctcagaaacttctttgggatgttgcattcaagtcacagagtagaacattcccattcatagagcagatttgaaacactctttttgtagtatctggaagtggacatttggagcgctttcaggcctatgttgaaaaaggaaatatcttcccataaaaactagacggaagcattctcagaaacttacttgtgatgtgtttgctcaactaacagaattgaaccatcgttttgaaggagcagttttgaaacactgttttcgtggaatctgcaagtggatatttggctagctttgaggatttcgttggaaacgggattacatataaaaaggagacagcagcattctcagaaacttctttgtgatgtctgcattcaagtcacagagttgagcattccctttcatagagcaggttggaaacactctttttgtagtatctggatgaggacatttggagcgctttcaggcgtatggtgaaaaaggaaatatcttcccgtaaaaactagacagaagcattctcagaaatttatttgtgatgtgtgccctcaactaacagagttgaacctttcttttgatagagcagttttgaaacactctttttgtaaaatctgcaagaggatatttggatagctttgaggatttcgttgcaaacgggaatggcttcatataaactctagacagaagcattctcagaaacttcgttgggatgtttcgattgaagtcccagtgttgaacattcccttttatagagcaggttggaaacactctttctgcattccctggaagtggacatttggagcgctttcaggacgacggtgaaaatggaaatatcttccaagaaaatctagatagaagcaacgtcagaaacttttatgtgatggatctactcagctaacagagttgaacctttcttttgagagagcagttttgcaacactctttttgtggaatatgcaagtggatattagggcagctttgaggatttcgttggaaacgggaatacatgtaaaaagcagacagcagcattctcagaaacttctttgtgatgtttgcattgaagtcacagagttgaacattccctttgagagagcaggtttgaaacacgccttttgtcatatctggaagtgtccattcggagcgcattcaggcttgtgttgaaaaaggaaaatatcctcccataaaaactagacagaagcattctcagaaacttatctgtgatgtatgtactcaactaacagaactaaaccatcgttttgaaggagcagttttgaaacactctttgtgcggaatctgcaagtggatatttggctagctgggaggatttcgttggaaacgggattacatacaaaaagcagacagcagcattctcagaaacttctttgtgatgtttgcattcaagtcacagagttgaacattccctttcatagagcaggtttgaaacactctttttgtagtatctggatgtggacatttggatcgctttcaggcctatggtgaaaaaggaaatatcttcccatgaaaactagacagaagcattctcagaaacttatttgtgatgtgtgccctcaactgacagtgttgaacctttgttttgatagagcagttctgaaacacactttttgtaaaatctgcaagaggatatttggatagctttgaggatttcgttggaaacgggaatgtcttcatgtaaactctggacagaagcattctcagaaactgctttgggatgtttcaattgaagtcccagtgttgaacattccctttcataggagcaggtttgaaacactctttttgtactatctggaagtggacatttggagcgctttcaggtctacggtgaaaaaggagatatcttccaataaaaactagatagaagcaatgtcagaacttttttcatgatgtatctactcagcaaacagagttgaacctttcttttgagagagcagttttgaaacactctttttgtggaatatgcaagtgggtattaggccagcttggaggatttcgttggaaacgggaatacgtataaaaagcagacagcagcattgtcagaaactactttgtgatgtttgcattcaagtcacagaattgaacactccctttcacagagcaggtttgaaacactctttttgtagtgtctgtaagtgaacatatggattgctttcaggcctaaggtgaaaaaggaaatatcttcccataaaaactagacagaagcattctcagaaacttgtttgtgatgtgtgccctctactgacagagttgaacctttctttgcaaagaccagttttgaaacactctttttgtagaatctgcaagaggatatttggatagctttgaggatttcttgggaaacgggaatgtcttcagataaactctagacagaagcattctgagaaacttctttgggatgtttcaattgaagtcacagtgttgaacattccctttcacagagcaggtttgaaacactctttttgtagtgtctataagtgaacatttggcgtgctttcaggcctaacgtgaaaaaggaaatatcttcccataaaaacgagacagaagcattctcagaaacttgttcgtgatgtgtgccctctactgacagagttgaacctttctttgcaaagagcagctttgaaacactctttttgtagaatctgcaagaggatatttggatagctttgaggatttcgttggaaacgggtatgtcttcagataaactctagacagaagcattctcagaaacttctttgggatgttgcattcaagtcacagagtagaacattcccattcatagagcagatttgaaacactctttttgtagtatctggaagtggacatttggagcgctttcaggcctatgttgaaaaaggaaatatcttcccataaaaactagacggaagcattctcagaaacttacttgtgatgtgtttgctcaactaacagaattgaaccatcgttttgaaggagcagttttgaaacactgttttcgtggaatctgcaagtggatatttggctagcttgaggatttcgttggaaacgggattacatataaaaaggagacagcagcattctcagaaacttctttgtgatgtttgcattcaagtcgcagagttgaacattccctttcatagagcaggtttgaaaaactctttttgtagtatctggatgtggacatttggatcgctttcaggccgacggtgaaaaaggaaatatcttcccatgaaaactagacagaagcattctcagaaacttatttgtgatgtgtgccctcaactgacagtgttgaacctttgttttgatagagcagttctgaaacacactttttgtaaaatctgcaagaggatatttggatagctttgaggatttcgttggaaacgggaatgtcttcatgtaaactctagacagaagcattctcagaaactgctttgggatgtttcaattgaagtcccagtgttgaacattcccattcatagagcaggtttgaaacactctttttgtactatctggaagtggacatttggagcgctttcaggtctacggtgaaaaaggagatatcttccaataaaaactagatagaagcaatgtcagaacttttttcatgatgtatctactcagcaaacagagttgaacctttcttttgagggagcagttttgaaacactatttttgtggaatatgcaagtgggtattaggccagcttggaggatttcgttggaaacggtaatacgtataaaaagcagacagcagcattgtcagaaactactttgtgatgtttgcattcaagtcacagaattgaacactccctttcacagagcaggtttgaaacactctttttgtagtgtctgtaagtgaacatttggattgctttcaggcctaaggtgaaaaaggaaatatcttcccataaaaactagacagaagcattctcagaaacttgtttgtgatgtgtgccctctactgacagagttgaacctttctttgcaaagagcagttttgaaacactctttttgtagaatctgcaagaggatatttggatagctttgaggatttcttgggaaacgggaatgtcttcagataaactctagacagaagcattctcagaaacttctttgggatgtttcaattgaagtcacagggttgaacattccctttcacagagcaggtttgaaacactctttttgtagtgtctataagtgaacatttggcgtgatttcaggccaaacgtgaaaaaggaaatatcttcccataaaaactagacagaagcattctgagaaacttgttcgtgatgtgtgccctctactgacagagttgaacctttctttgcaaagagcagctttgaaacactctttttgtagaatctgcaagaggatatttggatagctttgaggatttcgttggaaacggggatgtcttcagataaactctagacagaagcattctcagaaacttctttgggatgttgcattcaagtcacagagtagaacattcccattcatagagcagatttgaaacactctttttgtagtatctggaagtggacatttggagcgctttcaggcctatgttgaaaaaggaaatatcttcccataaaaactagacggaagcattctcagaaacttacttgtgatgtgtttgctcaactaacagaattgaaccatcgttttgaaggagcagttttgaaacactgttttcgtggaatctgcaagtggatatttggctagctttgaggatttcgttggaaacgggattacatataaaaaggagacagcaccattctcagaaacttctttgtgctgtctgcattcaagtcacagagttgagcattccctttcatagagcaggttggaaacactctttttgtagtatctggatgaggacatttggagcgctttcaggcgtatggtgaaaaaggaaatatcttcccgtaaaaactagacagaagcattctcagaaatttatttgtgatgtgtgccctcaactaacagagttgaacctttcttttgatagagcagttttgaaacactctttttgtaaaatctgcaagaggatatttggatagctttgaggatttcattgcaaacgggaatggcttcatataaactctagacagaagcattctcagaaacttcgttgggatgtttcgattgaagtcccagtgttgaacattcccttttatagagcaggttggaaacactctttctgcattccctggaagtggacatttggagcgctttcaggacgacggtgaaaatggaaatatcttccaagaaaatctagatagaagcaacgtcagaaacttttatgtgatggatctactcagctaacagcagttgaacctttcttttgagagagcagttttgcaacactctttttgtggaatatgcaagtggatattagggcagctttgaggatttcgttggaaacgggaatacatgtaaaaaggagacagcagcattctcagaaacttctttgtgatgtttgcattgaagtcacagagttgaacattccctttgagagagcaggtttgaaacacgccttttgtcatatctggaagtgtccattcggagcgcattcaggcttgtgttgaaaaaggaaatatcctcccataaaaactagacagaagcattctcagaaacttatctgtgatgtatgtactcaactaacagaactaaaccatcgttttgaaggagcagttttgaaacactctttttgcggaatctgcaagtggatatttggctagctgggaggatttcgttggaaacgggattacatacaaaaagcagacagcagcattctcagaaacttctttgtgatgtttgcattcaagtcacagagttgaacattccctttcatagagcaggtttgaaacactctttttgtagtatctggatgtggacatttggatcgctttcaggcctatggtgaaaaaggaaatatcttcccatgaaaactagacagaagcattctcagaaacttatttgtgatgtgtgccctcaactgacagtgttgaacctttgttttgatagagcagttctgaaacacactttttgtaaaatctgcaagaggatatttggatagctttgaggatttcgttggaaacgggaatgtcttcatgtaaactctagacagaagcattctcagaaactgctttgggatgtttcaattgaagtcccagtgttgaacattcccattcatagagcaggtttgaaacactctttttgtactatctggaagtggacatttggagcgctttcaggtctacggtgaaaaaggagatatcttccaataaaaactagatagaagcaatgtcagaacttttttcatgatgtatctactcagcaaacagagttgaacctttcttttgagagagcagttttgaaacactctttttgtggaatatgcaagtgggtattaggccagcttggaggatttcgttggaaacgggaatacgtataaaaagcagacagcagaattgtcagaaactactttgtgatgtttgcattcaagtcacagaattgaacactccctttcacagagcaggtttgaaacactctttttgtagtgtctgtaagtgaacatttggattgctttcaggcgtaaggtgaaaaaggaaatatcttcccataaaaactagacagaagcattctcagaaacttgtttgtgatgtgtgccctctactgacagagttgaacctttctttgcaaagagcagttttgaaacactctttttgtagaatctgcaagaggatatttggatagctttgaggatttcttgggaaacgggaatgtcttcagataaactctagacagaagcattctcagaaacttctttgggatgtttcaattgaagtcacagtgttgaacattccctttcacagagcaggtttgaaacactctttttgtagtgtctataagtgaacatttggcgtgctttcaggcctaacgtgaaaaaggaaatatcttcccataaaaactagacagaagcattctcagaaacttgttcgtgatgtgtgccctctactgacagagttgaacctttctttgcaaagagcagctttgaaacacacatttgtagaatctgcaagaggatatttggatagcttggaggatttcgttggaaacgggtatgtcttcagataaactctagacagaagcattctcagaaacttctttgggatgttgcattcaagtcacagagtagaacattcccattcatagagcagatttgaaacactctttttgtagtatctggaagtggacatttggagcgctttcaggcctatgttgaaaaaggaaatatcttcccataaaaactagacggaagcattctcagaaacttatttgtgatgtgtttgctcaactaacaggattgaaccatcgttttgaaggagcagttttgaaacactgttttcgtggaatctgcaagtggatatttggctagctttgaggatttcgttggaaacgggattacatacaaaaagcagacagcagcattctcagaaacatctttgggatgtttgcattcaagtcacagagttgaacattctctttcatagagcaggtttgagacactctttttgtggtatctggaagtggacatttgggtcgctttgaggcctatggtgaaaaaagaaatatcttcccataaaaactagatagaagcattctcagaaatttatttgtgatgtgtgccctcaactaacagagttgaacctttcttttgatagagcagttttgaaacactctttttgtaaaatctgcaagaggatatttggatagctttgaggatttcgttgcaaacgggaatggcttcatataaactctagacagaagcattctcagaaacttcgttgggatgtttcgattgaagtcccagtgttgaacattcccttttatagagcaggttggaaacactctttctgcattccctggaagtggacatttggagcgctttcaggacgacggtgaaaatggaaatatcttccaagaaaatctagatagaagcaacgtcagaaacttttctgtgatggatctactcagctaacagagttgaacctttcttttgagagagcagttttgcaacactctttttgtggaatatgcaagtggatattagggcagctttgaggatttcgttggaaacgggaatacatgtaaaaagcagacagcagcattctcagaaacttctttgtgatgtttgcattgaagtcacagagttgaacattccctttgagagagcaggtttgaaacacgccttttgtcatatctggaagtgtccattcggagcgcattcaggcttgtgttgaaaaaggaaatatcctcccataaaaactagacagaagcattctcagaaacttatctgtgatgtatgtactcaactaacagaactaaaccatccttttgaaggagcagttttgaaacactctttttgcggaatctgcaagtggatatttggctagctgggaggatttcgttggaaacgggattacatacaaaaagcagacagcagcattctcagaaacttctttgtgatgtttgcattcaagtcacagagttgaacattccctttcatagagcaggtttgaaacactctttttgtagtatctggatgtggacatttggatcgctttcaggcctatggtgaaaaaggaaatatcttcccatgaaaactagacagaagcattctcagaaacttatttgtgatgtgtgccctcaactgacagtgttgaacctttgttttgatagagcagttctgaaacacactttttgtaaaatctgcaagaggatatttggatagctttgaggatttcgttggaaacgggaatgtcttcatgtaaactctagacagaagcattctcagaaactgctttgggatgtttcaattgaagtcccagtgttgaacattccctttcatagagcaggtttgaaacactctttttgtactatctggaagtggacatttggagcgctttcaggtctacggtgaaaaaggagatatcttccaataaaaactagatagaagcaatgtcagaacttttttcatgatgtatctactcagcaaacagagttgaacctttcttttgagagagcagttttgaaacactctttttgtggaatatgcaagtgggtattaggccagcttggaggatttcgttggaaacgggaatacgtataaaaagcagacagcagcattgtcagaaactactttgtgatgtttgcattcaagtcacagaattgaacactccctttcacagagcaggtttgaaacactctttttgtagtgtctgtaagtgaacatttggattgctttcaggcctaaggtgaaaaaggaaatgtcttcccataaaaactagacagaagcattctcagaaacttgtttgtgatgtgtgccctctactgacagagttgaacctttctttgcaaagagcagttttgaaacactctttttgtagaatctgcaagaggatatttggatagctttgaggatttcttgggaaacgggaatgtcttcagataaactctagacagaagaattctcagaaacttctttgggatgtttcaattgaagtcacagtgttgaacattccctttcacagagcaggtttgaaacactctttttgtagtgtctataagtgaacatttggcgtgctttcaggcctaacgtgaaaaaggaaatatcttcccataaaaactagacagaagcattctcagaaacttgttcgtgatgtgtgccctctactgacagagttgaacctttctttgcaaagagcagctttgaaacactctttttgtagaatctgcaagaggatatttggatagcttggaggatttcgttggaaacgggtatgtcttcagataaactctagacagaagcattctcagaaacttctttgggatgttgcattcaagtcacagagtagaacattcccattcatagagcagatttgaaacactctttttgtagtatctggaagtggacatttggagcgctttcaggcctatgttgaaaaaggaaatatcttcccataaaaactagacggaagcattctcagaaacttacttgtgatgtgtttgctcaactaacagaattgaaccatcgttttgaaggagcagttttgaaacactgttttcgtggaatctgcaagtggatatttggctagctttgaggatttcgttggaaacgggattacatataaaaaggagacagcagcattctcagaaacttctttgtgatgtctgcattcaagtcacagagttgagcattccctttcatagagcaggttggaaacactctttttgtagtatctggatgaggacatttggagcgctttcaggcctatggtgaaaaaggaaatatcttcccgtaaaaactagacagaagcattctcagaaatttatttgtgatgtgtgccctcaactaacagagttgaacctttcttttgatagagcagttttgaaacactctttttgtaaaatctgcaagaggatatttggatagctttgaggatttcgttgcaaacgggaatggcttcatataaactctagacagaagcattctcagaaacttcgttgggatgtttcgattgaagtcccagtgttgaacattcccttttatagagcaggttggaaacactctttctgcattccctggaagtggacatttggagcgctttcaggacgacggtgaaaatggaaatatcttccaagaaaatctagatagaagcaacgtcagaaacttttctgtgatggatctactcagctaacagagttgaacctttcttttgagagagcagttttgcaacactctttttgtggaatatgcaagtggatattagggcagctttgaggatttcgttggaaacgggaatacatgtaaaaagcagacagcagcattctcagaaacttctttgtgatgtttgcattgaagtcacagagttgaacattccctttgagagagcaggtttgaaacacgccttttgtcatatctggaagtgtccattcggagcgcattcaggcttgtgttgaaaaaggaaatatcctcccataaaaactagacagaagcattctcagaaacttatttgtgatgtatgtactcaactaacagaactaaaccatcgttttgaaggagcagttttgaaacactctttttgcggaatctgcaagtggatatttggctagctgggaggatttcgttggaaacgggattacatacaaaaagcagacagcagcattctcagaaacttctttgtgatgtttgcattcaagtcacagagttgaacattccctttcatagagcaggtttgaaacactctttttgtagtatctggatgtggacatttggatcgctttcaggcctatggtgaaaaaggaaatatcttcccatgaaaactagacagaagcattctcagaaacttatttgtgatgtgtgccctcaactgacagtgttgaacctttgttttgatagagcagttctgaaacacactttttgtaaaatctgcaagaggatatttggatagctttgaggatttcgttggaaacgggaatgtcttcatgtaaactctagacagaagcattctcagaaactgctttgggatgtttcaattgaagtcccagtgttgaacattcccattcatagagcatgtttgaaacactctttttgtagtatctggaagtggacatttggagggctttcaggtctacggtgaaaaaggagatatcttccaataaaaactagatagaagcaatgtcagaacttttttcatgatgtatctactcagcaaacagagttgaacctttcttttgagagagcagttttgaaacactctttttgtggaatatgcaagtgggtattaggccagcttggaggatttcgttggaaacgggaatacgtataaaaagcagacagcagcattgtcagaaactactttgtgatgtttgcattcaagtcacagaattgaacactccctttcacagagcaggtttgaaacactctttttgtagtgtctgtaagtgaacatttggattgatttcaggcctaaggtgaaaaaagaaatatcttcccataaaaactagacagagagcattctcagaaacttgtttgtgatgtgtgccctctactgacagagttgaacctttctttgcaaagaccagttttgaaacactctttttgtagaatctgcaagaggatatttggatagctttgaggatttcttgggaaacgggaatgtcttcagataaactctagacagagcattctcagaaacttctttgggatgtttcaattgaagtcacagtgttgaacattccctttcacagagcaggtttgaaacactctttttgtagtgtctataagtgaacatttggcgtgctttcaggcctaacgtgaaaaaggaaatatcttcccataaaaactagacagaagcattctcagaaacttgttcatgatgtgtgccctctactgacagagttgaacctttctttgcaaagagcagctttgaaacactctttttgtagaatctgcaagaggatatttggatagctttgaggatttcgttggaaacgggtatgtcttcagataaactctagacagaagcattctcagaaacttctttgggatgttgcattcaagtcacagagtagaacattcccattcatagagcagatttgaaacactctttttgtagtatctggaagtggacatttggagcgctttcaggcctatgttgaaaaaggaaatatcttcccataaaaagtagacggaagcattctcagaaacttacttgtgatgtgtttgctcaactaacagaattgaaccatcgttttgaaggagcagttttgaaacactgttttcgtggaatctgcaagtggatatttggctagctttgaggatttcgttggaaacgggattacatatacaaaggagacagcagcattctcagcaaacttctttgtgatgtctgcattcaagtcacagagttgagcattccctttcatagagcaggttggaaacactctttttgtagtatctggatgaggacatttggagcgctttcaggcctatggtgaaaaaggaaatatcttcccgtaaaaactagacagaagcattctcagaaatttatttgtgatgtgtgccctcaactaacagagttgaacctttcttttgatagagcagttttgaaacactctttttgtaaaatctgcaagaggatatttggatagctttgaggatttcgttgcaaacgggaatggcttcatataaactctagacagaagcattctcagaaacttcgttgggatgtttcgattgaagtcccagtgttgaacattcccttttatagagcaggttggaaacactctttctgcattccctggaagtggacatttggagcgctttcaggacgacggtgaaaatggaaatatcttccaagaaaatctagatagaagcaacgtcagaaacttttctgtgatggatctactcagctaacagagttgaacctttcttttgagagagcagttttgcaacactctttttgtggaatatgcaagtggatattagggcagctttgaggatttcgttggaaacgggaatacatgtaaaaagcagacagcagcattctcagaaagttctttgtgatgtttgcattgaagtcacagagttgaacattccctttgagagagcaggtttgaaacacgccttttgtcatatctggaagtgtccattcggagcgcattcaggtttgtgttcaaaaaggaaatatcctcccataaaaactagacagaaagcattctcagcaaacttatctgtgatgtatgtactcaactaacagaactaaaccatcgttttgaaggagcagttttgaaacactctttttgcggaatctgcaagtggatatttggctagctgggaggatttcgttggaaacgggattacatacaaaaagcagacagcagcattctcagaaacttctttgtgatgtttgcattcaagtcacagagttgaacattccctttcatagagcaggtttgaaacactctttttgtagtatctggatgtggacatttggatcgctttcaggcctatggtgaaaaaggaaatatcttcccatgaaaactagacagaagcattctcagaaacttatttgtgatgtgtgccctcaactgacagtgttgaacctttgttttgatagagcagttctgaaacacactttttgtaaaatctgcaagaggatatttggatagctttgaggatttcgttggaaacgggaatgtcttcatgtaaactctacacagaagcattctcagaaactgctttgggatgtttcaattgaagtcccagtgttgaacattcccattcatagagcaggtttgaaacactctttttgtactatctggaagtggacatttggagcgctttcaggtctacggtgaaaaaggagatatcttccaataaaaactagatagaagcaatgtcagaacttttttcatgatgtatctactcagcaaacagagttgaacctttcttttgagagagcagttttgaaacactctttttgtggaatatgaaagtgggtattaggccagcttggaggatttcgttggaaacgggaatacgtataaaaagcagacagcagcattgtcagaaactactttgtgatgtttgcattcaagtcacagaactgaacactccctttcacagagcaggtttgaaacactctttttgtagtgtctgtaagtgaacatttggattgctttcaggcctaaggtgaaaaaggaaatatcttcccataaaaactagacagaagcattctcagaaacttgtttgtgatgtgtgccctctactgacagagttgaacctttctttgcaaagagcagttttgaaacactctttttgtagaatctgcaagaggatatttggatagctttgaggatttcttgggaaacgggaatgtcttcagataaactctagacagaagcatactcagaaacttctttgggacgtttcaattgaagtcacagtgttgaacattccctttcacagagcaggtttgaaacactctttttgtagtgtctataagtgaacatttggcgtgctttcaggcctaacgtgaaaaaggaaatatcttcccataaaaactagacagaagcattctcagaaacttgttcatgatgtgtgccctctactgacagagttgaacctttctttgcaaagagcagctttgaaacactctttttgtagaatctgcaagaggatatttggatagctttgaggatttcgttggaaacgggtatgtacttcagataaactctagacagaaacattctcagaaacttctttgggatgttgcattcaagtcacagagtagaacattcccatgcatagagcagatttgaaacactctttttgtagtatctggaagtggacatttggagcgctttcaggcctatgttgaaaaaggaaatatcttcccataaaaactagacgggaagcattctcagaaacttacttgtgatgtgtttgctcaactaacagaattgaaccatcgttttgaaggagcagttttgaaacactgttttcgtggaatctgcaagtggatatttggctagctttgaggatttcgttggaaacgggattacatatacaaaggagacagcagcattctcagaaacttctttgtgatgtctgcattcaagtcacagagttgagcattccctttcatagagcaggttggaaacactctttttgtagtatctggatgaggacatttggagcgctttcaggcctatggtgaaaaaggaaatatcttcccgtaaaaactagacagaagcattctcagaaatttatttgtgatgtgtgccctcaactaacagagttgaacctttcttttgatagagcagttttgaaacactctttttgtaaaatctgcaagaggatatttggatagctttgaggatttcgttgcaaacgggaatggcttcatataaactctagacagaagcattctcagaaacttcgttgggatgtttcgattgaagtcccagtgttgaacattcccttttatagagcaggttggaaacactctttctgcattccctggaagtggacatttggagcgctttcaggacgacggtgaaaatggaaatatcttccaagaaaatctagatagaagcaatgtcagaaacttttatgtgatggatctactcagctaacagagttgaagctttcttttgagagagcagttttgcaacactctttttgtggaatatgcaagtggatattagggcagctttgaggatttcgttggaaacgggaatacatgtaaaaagcagacagcagcattctcagaaacttctttgtgatgtttgcattgaagtcacagagttgaacattccctttgagagagcaggtttgaaacacgccttttgtcatatctggaagtgtccattcggagcgcattcaggcttgtgttgaaaaaggaaatatcctcccataaaaactagacagaagcattctcagaaacttatctgtgatgtatgtactcaactaacagaactaaaccatcgttttgaaggagcagttttgaaacacttttttgcggaatctgcaagtggatatttggctagctgggaggatttcgttggaaacgggattacatacaaaaagcagacagcagcattctcagaaacttatttgtgatgtgtgccctcaactgacagtgttgaacctttgttttgatagagcagttctgaaacacactttttgtaaaatctgcaagaggatatttggatagctttgaggatttcgttggaaacgggaatgtcttcatgtaaactctagacagaagcattctcagaaactgctttgggatgtttcaattgaagtcccagtgttgaacattcccattcatagagcaggtttgaaacactctttttgtactatctggaagtggacatttggagcgctttcaggtctacggtgaaaaaggagatatcttccaataaaaactagatagaagcaatgtcagaacttttttcatgatgtatctactcagcaaacagagttgaacctttcttttgagagagcagttttgaaacactctttttgtggaatatgcaagtgggtattaggccagcttggaggatttcgttggaaacgggaatacgtataaaaagcagacagcagcattgtcagaaactactttgtgatgtttgcattcaagtcacagaattgaacactccctttcacagagcaggtttgaaacactctttttgtagtgtctgtaagtgaacatttggattgctttcaggcctaaggtgaaaaaggaaatatcttcccataaaaactagacagaagcattctcagaaacttgtttgtgatgtgtgccctctactgacagagttgaacctttctttgcaaagagcagttttgaaacactctttttgtagaatctgcaagaggatatttggatagctttgaggatttcttgggaaacgggaatgtcttcagataaactctagacagaagcattctcagaaacttctttgggatgtttcaattgaagtcacagtgttgaacattccctttcacagagcaggtttgaaacactctttttgtagtgtctataagtgaccatttggcgtgctttcaggcctaacgtgaaaaaggaaatatcttcccataaaaactagacagaagcattctcagaaacttgttcgtgatgtgtgccctctactgacagagttgaacctttcttttcaaagagcagctttgaaacacactttttgtagaatctgcaagaggatatttggatagttttgaggatttcgttggaaacgggtatgtcttcagataaactctagacagaagcattctcagaaatttctttgggatgttgcatgcaagtcacagagtagaacattcccattcatagagcagatttgaaacactctttttgtactatctggaagtggacatttggagcgctttcaggcctatgttgaaaaaggaaatatcttcccataaaaactagacggaagcattctcagaaacttaattgtgatgagtttgctcaactaacaggattgaaccatcgttttgaaggagcagttttgaaacactgttttcgtggaatctgcaagtggatatttggctagctttgaggatttcgttggaaacgggattacatataaaaaggagacagcagcattctcagaaacttctttgtgatgtctgcattcaattcacagagttgagcattccctttcatagagcaggttggaaacactctttttgtagtatctggatgaggacatttggagcgctttcaggcgtatggtgaaaaaggaaatatcttcccctaaaaactagacagaagcattctcagaagtttatttgtgatgtgtgccctcaactaacagagttgaacctttcttttgatagagcagttttgaaacactctttttgtaaaatctgcaagaggatatttggatagctttgaggatttcgttgcaaacgggaatggcttcatataaactctagacagaagcattctcagaaacttcgttgggatgtttcgattgaagtcccagtgttgaacattcccttttatagagcaggttggaaacactctttctgcattccctggaagtggacatttggagcgctttcaggacgacggtgaaaatggaaatatcttccaagaaaatctagatagaagcaatgtcagaaacttttatgtgatggatctactcagctaacagagttgaacctttcttttgagagagcagttttgcaacactctttttgtggaatatgcaagtggatattagggcagctttgaggatttcgttggaaacgggaatacatgtaaaaagcagacagcagcattctcagaaacttctttgtgatgtttgcattgaagtcacagagttgaacattccctttgagagagcaggtttgaaacacgccttttgtcatatctggaagtgtccattcggagcgcattcaggcttgtgttgaaaaaggaaatatcctcccataaaaactagacagaagcattctcagaaacttatctgtgatgtatgtactcaactaacagaactaaaccatcgttttgaaggagcagttttgaaacactctttttgcggaatctgcaagtggatatttggctagctgggaggatttcgttggaaacgggattacatagaaaaagcagacagcagcattctcagaaacttctttgtgatgtttgcattcaagtcacagagttgaacattccctttcatagagcaggttggaaacactctttttgtagtatctggatgtggacatttggatcgctttcaggcctatggtgaaaaaggaaatatcttcccatgaaaactagacagaagcattctcagaaacttatttgtgatgtgtgccctcaactgacagtgttgaacctttgttttgatagagcagttctgaaacacactttttgtaaaatctgcaagaggatatttggatagctttgaggatttcgttggaaacgggaatgtcttcatgtaaactctagacagaagcattctcagaaactgctttgggatgtttcaattgaagtcccagtgttgaacattcccattcatagagcaggtttgaaacactctttttgtactatctggaagtggacatttggagcgctttcaggtctacggtgaaaaaggagatatcttccaataaaaactagatagaagcaatgtcagaactttttccatgatgtatctactcagcaaacagagttgaacctttcttttgagagagcagttttgaaacactctttttgtggaatatgcaactgggtattaggccagcttggaggatttcgttggaaacgggaatacgtataaaaagcagacagcagcattgtcagaaactactttgtgatgtttgcattcaagtcacagaattgaacactccctttcacagagcaggtttgaaacactctttttgtagtgtctgtaagtgaacatttggattgctttcaggcctaaggtgaaaaaggaaatatcttcccataaaaactagacagaagcattctcagaaacttgtttgtgatgtgtgccctctactgacagagttgaacctttctttgcaaagagcagttttgaaacactctttttgtagaatctgcaagaggatatttggatagctttgaggatttcttgggaaacgggaatgtcttcagataaactctagacagaagcattctcagaaacttctttgggatgtttcaattgaagtcacagtgttgaacattccctttcacagagcaggtttgaaacactctttttgtagtgtctataagtgaacatttggcgtgctttcaggcctaacgtgaaaaaggaaatatcttcccataaaaactagacagaagcattctcagaaacttgttcgtgatgtgtgccctctactgacagagttgaacctttctttgcaaagagcagctttgaaacacactttttgtagaatctgcaagaggatatttggatagctttgaggatttcgttggaaacgggtatgtcttcagataaactctagacagaagcattctcagaaacttctttgggatgttgcattcaagtcacagagtagaacattcccattcatagagcagatttgaaacactctttttgtagtatctggaagtggacatttggagcgctttcaggcctatgttgaaaaaggaaatatcttcccataaaaactagacggaagcattctcagaaacttatttgtgatgtgtttgctcaactaacaggattgaaccatcgttttgaaggagcagttttgaaacactgttttcgtggaatctgcaagtggatatttggctagctttgaggatttcgttggaaacgggattacatataaaaaggagacagcagcattctcagaaacttctttgtgatgtttgcattcaattcacagagttgagcattccctttcatagagcaggtttgaaacactctttttgtagtatctggatgtggacatttggatcgctttcaggcctatggtgaaaaaggaaatatcttcccatgaaaactagacagaagcattctcagaaacttatttgtgatgtgtgccctcaactgacagtgttgaacctttgttttgatagagcagttctgaaacacactttttgtaaaatctgcaagaggatatttggatagctttgaggatttcgttggaaacgggaatgtcttcatgtaaactctagacagaagcattctcagaaactgctttgggatgtttcaattgaagtcccagtgttgaacattccctttcatagagcaggtttgaaacactctttttgtagtatctggaagtggacatttggagcgctttcaggtctacggtgaaaaaggagatatcttccaataaaaactagatagaagcaatgtcagaacttttttcatgatgtatctactcagcaaacagagttgaagctttcttttgagagagcagttttgaaacactctttttgtggaatatgcaagtgggtattaggccagcttggaggatttcgttggaaacgggaatacgtataaaaagcagacagcagcattgtcagaaactactttgtgatgtttgcattcaagtcacagaattgaacactccctttcacagagcaggtttgaaacactctttttgtagtgtctgtaagtgaacatttggattgctttcaggcctaaggtgaaaaaggaaatatcttcccataaaaactagacagaagcattctcagaaacttgtttgtgatgtgtgccctctactgacagagttgaacctttctttgcaaagagcagttttgaaacactctttttgtagaatctgcaagaggatatttggatagctttgaggatttcttgggaaacgggaatgtcttcagataaactctagacagaagcattctcagaaacttctttgggatgttgcattcaagtcacagagtagaacattcccattcatagagcagatttgaaacactctttttgtagtatctggaagtggacatttggagcgctttcaggcctatgttgaaaaaggaaatatcttcccataaaaactagacggaagcattctcagaaacttacttgtgatgtgtttgctcaactaacagaattgaaccatcgttttgaaggagcagttttgaaacactgttttcgtggaatctgcaagtggatatttggctagctttgaggatttcgttggaaacgggattacatataaaaaggagacagcagcattctcagaaacatctctgtgatgtttgcattcaagtcacagagttgaacattccctttcatagagcaggtttgaaacactctttttgtagtatctggaagtgcacatttggagtgcattcaggcctaaggtgaaaaaggaaatatcttcccataaaaactagacagaagcattctcagaaatttatttgtgatgtgtgccttcaactaacagagttgaacctttcttttgatagagcagttttgaaacactctttttgtaaaatctgcaagaggatatttggatagtttgaggatttcgttgcaaacgggaatggcttcatataaactctagacagaagcattctcagaaacttcgttgggatgtttcgattgaagtcccagtgttgaacattcccttttatagagcaggttggaaacactctttctgcattccctggaagtggacatttggagcgctttcaggacgacggtgaaaatggaaatatcttccaagaaaatctagatagaagcaatgtcagaaacttttatgtgatggatctactcagctaacagagttgaacctttcttttgagagagcagttttgcaacactctttttgtggaatatgcaagtggatattagggcagctttgaggttttcgttggaaacgggaatacatgtaaaaagcagacagcagcattctcagaaacttctttgtgatgtttgcattgaagtcacagagttgaacattccctttgagagagcaggtttgaaacacgccttttgtcatatctggaagtgtccattcggagcgcattcaggcttgtgttgaaaaaggaaatatcctcccataaaaactagacagaagcattctcagaaacttatctgtgatgtatgtactcaactaacagaactaaaccatcgttttgaaggagcagttttgaaacactctttttgcggaatctgcaagtggatatttggctagctgggaggatttcgttggaaacgggattacatacaaaaagcagacagcagcattctcagaaacttctttgtgatgtttgcattcaagtcacagagttgaacattccctttcatagagcaggtttgaaacactctttttgtagtatctggatgtggacatttggatcgctttcaggcctatggtgaaaaaggaaatatcttcccatgaaaactagacagaagcattctcagaaacttatttgtgatgtgtgccctcaactgacagtgttgaacctttgttttgatagagcagttctgaaacacactttttgtaaaatctgcaagaggatatttggatagctttgaggatttcgttggaaacgggaatgtcttcatgtaaactctagacagaagcattctcagaaactgctttgggatgtttcaattgaagtcccagtgttgaacattccctttcatagagcaggtttgaaacactctttttgtagtatctggatgaggacatttggagcgctttcaggcgtatggtgaaaaaggaaatatcttcccgtaaaaactagacagaagcattctcagaagtttatttgtgatgtgtgccctcaactaacagagttgaacctttcttttgatagagcagttttgaaacactctttttgtaaaatctgcaagaggatatttggatagctttgaggatttcgttgcaaacgggaatggcttcatataaactctagacagaagcattctcagaaacttcgttgggatgtttcgattgaagtcccagtgttgaacattcccttttatagagcaggttggaaacactctttctgcattccctggaagtggacatttggagcgctttcaggacgacggtgaaaatggaaatatcttccaagaaaatctagatagaagcaatgtcagaaacttttatgtgatggatctactcagctaacagagttgaacctttcttttgagagagcagttttgcaacactctttttgtggaatatgcaagtggatattagggcagctttgaggatttcgttggaaacgggaatacatgtaaaaagcagacagcagcattctcagaaacttctttgtgatgtttgcattgaagtcacagagttgaacattccctttgagagagcaggtttgaaacacgccttttgtcatatctggaagtgtccattcggagcgcattcaggcttgtgttgaaaaaggaaatatcctcccataaaaactagacagaagcattctcagaaacttatctgtgatgtatgtactcaactaacagatctaaaccatcgttttgaaggagcagttttgaaacactctttttgcggaatctgcaagtggatatttggctagctgggaggatttcgttggaaacgggattacatacaaaaagcagacagcagcattctcagaaacttctttgtgatgtttgcattcaagtcacagagttgaacattccctttcatagagcaggtttgaaacactctttttgtagtatctggatgtggacatttggatcgctttcaggcctatggtgaaaaaggaaatatcttcccatgaaaactagacagaagcattctcagaaacttatttgtgatgtgtgccctcaactgacagtgttgaacctttgttttgatagagcagttctgaaacacactttttgtaaaatctgcaagaggatatttggatagctttgaggatttcgttggaaacgggaatgtcttcatgtaaactctagacagaagcattctcagaaactgctttgggatgtttcaattgaagtcccagtgttgaacattccctttcatagagcaggtttgaaacactctttttgtactatctggaagtggacatttggagcgctttcaggtctacggtgaaaaaggagatatcttccaataaaaactagatagaagcaatgtcagaacttttttcatgatgtatctactcagcaaacagagttgaacctttcttttgagagagcagttttgaaacactctttttgtggaatatgcaagtgggtattaggccagcttggaggatttcgttggaaacgggaatacgtataaaaagcagacagcagcattgtcagaaactactttgtgatgtttgcattcaagtcacagaattgaacactccctttcacagagcaggtttgaaacactctttttgtagtgtctgtaagtgaacatttggattgctttcaggcctaaggtgaaaaaggaaatatcttcccataaaaactagacagaagcattctcagaaacttgtttgtgatgtgtgccctctactgacagagttgaaactttctttgcaaagagcagttttgaaacactctttttgtagaatctgcaagaggatatttggatagctttgaggatttcttgggaaacgggaaggtcttcagataaactctagacagaagcattctcagaaacttctttgggatgtttcaattgaagtcacagtgttgaacattccctttcgcagagcaggtttgaaacactctttttgtagtgtctataagtgaacatttggcagtgctttcaggcctaacgtgaaaaaggaaatatcttcccataaaaactagacagaagcattctcagaaacttgttcgtgatgtgtgccctctactgacagagttgaacctttctttgcaaagagcagctttgaaacacactttttgtagaatctgcaagaggatatttggatagcttggaggatttcgttggaaacgggtatgtcttcagataaactctagacagaagcattctcagaaacttcttcgggatgttgcatgcaagtcacagagtagaacattcccattcatagagcagatttgaaacactctttttgtagtatctggaagtggacatttggagcgctttcaggcctatgttgaaaaaggaaatatcttcccataaaaactagacggaagcattctcagaaacttatttgtgatgtgtttgctcaactaacaggattgaaccatcgttttgaaggagcagttttgaaacactgttttcgtggaatctgcaagtggatatttggctagctttgaggatttcgttggaaacgggattacatataaaaaggagacagcagcattctcagaaacttctttgtgatgtctgcattcaattcacagagttgagcattccctttcatagagcaggttggaaacactctttttgtagtatctggatgaggacatttggagcgctttcaggcgtatggtgaaaaaggaaatatcttcccgtaaaaactagacagaagcattctcagaaatttatttgtgatgtgtgccctcaactaacagagttgaacctttcttttgatagagcagttttgaaacactctttttgtaaaatctgcaagaggatatttggatagctttgaggatttcattgcaaacgggaatggcttcatataaactctagacagaagcattctcagaaacttcgttgggatgtttcgattgaagtcccagtgttgaacattcccttttatagagcaggttggaaacagtctttctgcattccctggaagtggacatttggagcgctttcaggacgacggtgaaaatggaaatatcttccaataaaatctggatagaagcaatgtcagaaacttttctgtgatggatctactcagctaacagagttgaacctttcttttgagagagcagttttgcaacactctttttgtggaatatgcaagtggatattagggcagctttgaggatttcgttggaaacgggaatacatgtaaaaagcagacagcagcattctcagaaacttctttgtgatgtttgcattgaagtcacagagttgaacattccctttgagagagcaggtttgaaacacgccttttgtcatatctggaagtgtccattcggagcgcattcaggcttgtgttgaaaaaggaaatatcctcccataaaaactagacagaagcattctcagaaacttatctgtgatgtatgtactcaactaacagaactaaaccatcgttttgaaggagcagttttgaaacactctttttgcggaatctgcaagtggatatttggctagctgggaggatttcgttggaaacgggattacatacaaaaagcagacagcagcattctcagaaacttctttgtgatgtttgcattcaagtcacagagttgaacattccctttcatagagcaggtttgaaacactctttttgtagtatctggatgtggacatttggatcgctttcaggcctatggtgaaaaaggaaatatcttcccatgaaaactagacagaagcattctcagaaacttatttgtgatgtgtgccctcaactgacagtgttgaacctttgttttgatagagcagttctgaaacacactttttgtaaaatctgcaagaggatatttggatagcttttaggatttcgttggaaacgggaatgtcttcatgtaaactctagacagaagcattctcagaaactgctttgggatgtttcaattgaagtcccagtgttgaacattccctttcatagagcaggtttgaaacactctttttgtactatctggaagtggacatttggagcgctttcaggtctacggtgaaaaaggagatatcttccaataaaaactagatagaagcaatgtcagaacttttttcatgatgtatctactcagcaaacagagttgaacctttcttttgagagagcagttttgaaacactctttttgtggaatatgcaagtgggtattaggccagcttggaggatttcgttggaaacgggaatacgtataaaaagcagacagcagcattgtcagaaactactttgtgatgtttgcattcaagtcacagaattgaacactccctttcacagagcaggtttgaaacactctttttgtagtgtctgtaagtgaacatatggattgctttcaggcctaaggtgaaaaaggaaatatcttcccataaaaactagacagaagcattctcagaaacttgtttgtgatgtgtgccctctactgacagagttgaacctttctttgcaaagagcagttttgaaacactctttttgtagaatctgcaagaggatatttggatagctttgaagatttcttgggaaacgggaatgtcttcagataaactctagacagaagcattctcagaaacttctttgggatgtttcaattgaagtcacagtgttgaacattccctttcacagagcaggtttgaaacactctttttgtagtgtgtataagtgaacatttcgcgtgctttcaggcctaacgtgaaaaaggaaatatcttcccataaaaactagacagaagcattctcagaaacttgttcatgatgtgtgccctctactgacagagttgaacctttctttgcaaagagcagctttgaaacactctttttgtagaatctgcaagaggatatttggatagcttggaggatttcgttggaaacgggtatgtcttcagataaactctagacagaagcattctcagaaacttctttgggatgttgcattcaagtcacagagtagaacattcccattcatagagcagatttgaaacactctttttgtagtatctggaagtggacatttggagcgctttcaggcctatgttgaaaaaggaaatatcttcccataaaaactagacggaagcattctcagaaacttacttgtgatgtgtttgctcaactaacagaattgaaccatcgttttgaaggagcagttttgaaacactgttttcgtggaatctgcaagtggatatttggctagctttgaggatttcgttggaaacgggattacatataaaaaggagacagcagcattctcagaaacttctttgtgatgtctgcattcaagtcacagagttgagcattccctttcatagagcaggttggaaacactctttttgtagtatctggatgaggacatttggagcgctttcaggcctatggtgaaaaaggaaatatcttcccgtaaaaactagacagaaccattctcagaaatttatttgtgatgtgtgccctcaactaacagagttgaacctttcttttgatagagcagttttgaaacactctttttgtaaaatctgcaagaggatatttggatagctttgaggatttcgttgcaaacgggaatggcttcatataaactctagacagaagcattctcagaaacttcgttgggatgtttcgattgaagtcccagtgttgaacattcccttttatagagcaggttggaaacactctttctgcattccctggaagtggacatttggagcgctttcaggacgacggtgaaaatggaaatatcttccaagaaaatctagatagaagcaacgtcagaaacttttctgtgatggatctactcaagctaacagagttgaacctttcttttgagagagcagttttgcaacactctttttgtggaatatgcaagtggatattagggcagctttgaggatttcgttggaaacgggaatacatgtaaaaagcagacagcagcattctcagaaacttctttgtgatgtttgcattgaagtcacagagttgaacattccctttgagagagcaggtttgaaacacgccttttgtcatatctggaagtgtccattcggagcgcattcaggcttgtgttgaaaaaggaaatatcctcccataaaaactagacagaagcattctcagaaacttatctgtgatgtatgtactcaactaacagaactaaaccatcgttttgaaggagcagttttgaaacactctttttgcggaatctgcaagtggatatttggctagctgggaggatttcgttggaaacgggattacatacaaaaagcagacagcagcattctcagaaacttctttgtgatgtttgcattcaagtcacagagttgaacattccctttcatagagcaggtttgaaacactctttttgtagtatctggatgtggacatttggatcgctttcaggcctatggtgaaaaaggaaatatcttcacatgaaaactagacagaagcattctcagaaacttatttgtgatgtgtgccctcaactgacagtgttgaacctttgttttgatagagcagttctgaaacacactttttgtaaaatctgcaagaggatatttggatagctttgaggatttcgttggaaacgggaatgtcttcatgtaaactctacacagaagcattctcagaaactgctttgggatgtttcaattgaagtcccagtgttgaacattcccattcatagagcaggtttgaaacactctttttgtactatctggaagtggacatttggagcgctttcaggtctacggtgaaaaaggagatatcttccaataaaaactagatagaagcaatgtcagaacttttttcatgatgtatctactcagcaaacagagttgaacctttcttttgagagagcagttttgaaacactctttttgtggaatatgaaagtgggtattaggccagcttggaggatttcgttggaaacgggaatacgtataaaaagcagacagcagcattgtcagaaactactttgtgatgtttgcattcaagtcacagaattgaacactccctttcacagagcaggtttgaaacactctttttgtagtgtctgtaagtgaacatatggattgctttcaggcctaaggtgaaaaaggaaatatcttcccataaaaactagacagaagcattctcagaaacttgtttgtgatgtgtgccctctactgacagagttgaacctttctttgcaaagaccagttttgaaacactctttttgtagaatctgcaagaggatatttggatagctttgaggatttcttgggaaacgggaatgtcttcagataaactctagacagaagcattctgagaaacttctttgggatatttcaattgaagtcacagtgttgaacattccctttcacagagcaggtttgaaacactctttttgtagtgtctataagtgaacatttggcgtgctttcaggcgtaacgtgaaaaaggaaatatcttcccataaaaacgagacagaagcattctcagaaacttgttcgtgatgtgtgccctctactgacagagttgaacctttctttgcaaagagcagctttgaaacactctttttgtagaatctgcaagaggatatttggatagctttgaggatttcgttggaaacgggtatgtcttcagataaactctagacagaagcattctcagaaacttctttgggatgttgcattcaagtcacagagtagaacattcccattcatagagcagatttgaaacactctttttgtagtatctggaagtggacatttggagcgctttcaggcctatgttgaaaaaggaaatatcttcccataaaaactagacggaagcattctcagaaacttacttgtgatgtgtttgctcaactaacagaattgaaccatcgttttgaaggagcagttttgaaacactgttttcgtggaatctgcaagtggatatttggctagctttgaggatttcgttggaaacgggattacatataaaaaggagacagcagcattctcagaaacttctttgtgatgtctgcattcaagtcacagagttgagcattccctttcatagagcaggttggaaacactctttttgtagtatctggatgaggacatttggagcgctttcaggcgtatggtgaaaaaggaaatatcttcccgtaaaaactagacagaagcattctcagaaatttatttgtgatgtgtgccctcaactaacagagttgaacctttcttttgatagagcagttttgaaacactctttttgtaaaatctgcaagaggatatttggatagctttgaggatttcgttgcaaacgggaatggcttcatataaactctagacagaagcattctcagaaacttcgttgggatgtttcgattgaagtcccagtgttgaacattcccttttatagagcaggttggaaacactctttctgcattccctggaagtggacatttggagcgctttcaggacgacggtgaaaatggaaatatcttccaagaaaatctagatagaagcaatgtcagaaacttttatgtgatggatctactcagctaacagagttgaagctttcttttgagagagcagttttgccacactctttttgtggaatatgcaagtggatattagggcagctttgaggatttcgttggaaacgggaatacatgtaaaaagcagacagcagcattctcagaaacttctttgtgatgtttgcattgaagtcacagagttgaacattccctttgagagagcaggtttgaaacacgccttttgtcatatctggaagtgtccattcggagcgcattcaggcttgtgttgaaaaaggaaatatcctcccataaaaactagacagaagcattctcagaaacttatctgtgatgtatgtactcaactaacagaactaaagcatcgttttgaaggagcagttttgaaacactctttttgcggaatctgcaagtggatatttggctagctgggaggatttcgttggaaacgggattacatacaaaaagcagacagcagcattctcagaaacttctttgtgatgtttgcattcaagtcacagagttgaacattccctttcatagagcaggtttgaaacactctttttgtagtatctggatgtggacatttggatcgctttcaggcctatggtgaaaaaggaaatatcttcccatgaaaactagacagaagcattctcagaaacttatttgtgatgtgtgccctcaactgacagtgttgaacctttgttttgatagagcagttctgaaacacactttttgtaaaatctgcaagaggatatttggatagctttgaggatttcgttggaaacgggaatgtcttcatgtaaactctagacagaagcattctcagaaactgctttgggatgtttcaattgaagtcccagtgttgaacattccctttcatagagcaggtttgaaacactctttttgtagtgtctgtaagtgaacatttggattgctttcaggcctaaggtgaaaaaggaaatatcttcccataaaaactagacagaagcattctcagaaacttgtttgtgatgtgtgccctctactgacagagttgaacctttctttgcagagagcagttttgaaacactctttttgtagaatctgcaagaggatatttggatagctttgaggatttcttgggaaacgggaatgtcttcagataaactctagacagaagcattctcagaaacttctttgggatgtttcaattgaagtcacagtgttgaacattccctttcacagagcaggtttgaaacactctttttgtagtgtctataagtgaacatttggcgtgctttcaggcctaacgtgaaaaaggaaatatcttcccataaaaactagacagaagcattctcagaaacttgttcttgatgtgtcccctctactgacagagttgaacctttctttgcaaagagcagctttgaaacactctttttgtagaatctgcaagaggatatttggatagcttggaggatttcgttggaaacgggtatgtcttcagataaactctagacagaagcattctcagaaacttctttgggatgttgcattcaagtcacagagtagaacattcccattcatagagcagatttgaaacactctttttgtagtatctggaagtggacatttggagcgctttcaggcctatgttgaaaaaggaaatatcttcccataaaaactagacggaagcattctcagaaacttatttgtgatgtgtttgctcaactaacaggattgaaccatcgttttgaaggagcagttttgaaacactgttttcgtggaatctgcaagtggatatttggctagctttgaggatttcgttggaaacgggattacatataaaaaggagacagcagcattctcagaaacttctttgtgatgtctgcattcaattcacagagttgagcattccctttcatagagtaggttggaaacactctttttgtagtatctggatgaggacatttggagcgctttcaggcctatggtgaaaaaggaaatatcttcccgtaaaaactagacagaagcattctcagaaatttatttgtgatgtgtgccctcaactaacagagttgaacctttcttttgatagagcagttttgaaacactctttttgtaaaatctgcaagaggatatttggatagctttgaggatttcgttgcaaacgggaatggcttcatataaactctagacagaagcattctcagaaacttcgttgggatgtttcgattgaagtcccagtgttgaacattcccttttatagagcaggttggaaacactctttctgcattccctggaagtggacatttggagcgctttctggacgacggtgaaaatggaaatatcttccaagaaaatctagatagaagcaatgtcagaaactttatgtgatggatctactcagctaacagagttgaacctttcttttgagagagcagttttgcaacactccttttgtggaatatgcaagtggatattagggcagctttgaggatttcgttggaaacgggaatacatgtaaaaagcagacagcagcattctcagaaacttctttgtgatgtttgcattgaagtcacagagttgaacattccctttgagagagcaggtttgaaacacgccttttgtcatatctggaagtgtccattcggagcgcattcaggcttgtgttgaaaaaggaaatatcctcccagaaaaactagacagaagcattctcagaaacttatctgtgatgtatgtactcaactaacagaactaaagcatcgttttgaaggagcagttttgaaacactctttttgcggaatctgcaagtggatatttggctagctgggaggatttcgttggaaacgggattacatacaaaaagcagacagcagcattctcagaaacttctttgtgatgtttgcattcaagtcacagagttgaacattccctttcatagagcaggtttgaaacactctttttgtagtatctggatgtggacatttggatcgctttcaggcctatggtgaaaaaggaaatatcttcccatgaaaactagacagaagcattctcagaaacttatttgtgatgtgtgccctcaactgacagtgttgaacctttgttttgatagagcagttctgaaacacactttttgtaaaatctgcaagaggatatttggatagctttgaggatttcgttggaaacgggaatgtcttcatgtaaactctagacagaagcattctcagaaactgctttgggatgtttcaattgaagtcccagtgttgaacattcccattcatagagcaggtttgaaacactctttttgtactatctggaagtggacatttggagcgctttcaggtctacggtgaaaaaggagatatcttccaataaaaactagatagaagcaatgtcagaacttttttcatgatgtatctactcagcaaacagagttgaacctttcttttgagagagcagttttgaaacactctttttgtggaatatgcaagtgggtattaggccagcttggaggatttcgttggaaacgggaatacgtataaaaagcagacagcagcattgtcagaaactactttgtgatgtttgcattcaagtcacagaattgaacactccctttcacagagcaggtttgaaacactctttttgtagtgtctgtaagtgaacatatggattgctttcaggtctaaggtgaaaaaggaaatatcttcccataaaaactagacagaagcattctcagaaacttgtttgtgatgtgtgccctctactgacagagttgaacctttctttgcaaagagcagttttgaaacactctttttgtagaatctgcaagaggatatttggatagctttgaggatttcttgggaaacggaatgtcttcagataaactctagacagaagcattctcagaaacttcttgggatatttcaattgaagtcacagtgttgaacattccctttcacagagcaggtttgaaacactctttttgtagtgtctataagtgaacatttggcgtgctttcaggcctaacgtgaaaaaggaaatatcttcccataaaaactagacagaagcattctcagaaacttgttcgtgatgtgtgccctctactgacagagttgaaactttctttgcaaagagcagctttgaaacactctttttgtagaatctgccagaggatatttggatagctttgaggatttcgttggaaacgggtatgtcttcagataaactctagacagaagcattctcagaaacttctttgggatgttgcattcaagtcacagagtagaacattcccattcatagagcagatttgaaacactctttttgtagtatctggaagtggacatttggagcgctttcaggcctatgttgaaaaaggaaatatcttcccataaaaactagacggaagcattctcagaaacttacttgtgatgtgtttgctcaactaacagaattgaaacatcgttttgaaggagcagttttgaaacactgttttcgtggaatctgcaattggatatttggctagctttgaggatttcgttggaaacgggattacatataaaaaggagacagcagcattctcagaaacttctttgtgatgtctgcattcaagtcacaggagttgagcattccctttcatagagcaggttggaaacactctttgtgtagtatctggatgaggacatttggagcgctttcaggcgtatggtgaaaaaggaaatatcttcccgtaaaaactagacagaagcattctcagaagtttatttgtgatgtgtgccctcaactaacagagttgaacctttcttttgatagagcagttttgaaacactctttttgtaaaatctgcaagaggatatttggatagctttgaggatttcgttgcaaacgggaatggcttcatataaactctagacagaagcattctcagaaacttcgttgggatgtttcgattgaagtcccagtgttgaacattcccttttatagagcaggttggaaacactctttctgcattccctggaagtggacatttggagcgctttcaggacgacggtgaaaatggaaatatcttccaagaaaatctagatagaagcaatgtcagaaacttttctgtgatggatctactcagctaacagagttgaacctttcttttgagagagcagttttgcaacactctttttgtggaatatgcaagtggatattagggcagctttgaggatttcgttggaaacgggaatacatgtaaaaagcagacagcagcattctcagaaacttctttgtgatgtttgcattgaagtcacagagttgaacattccctttgagagagcaggtttgaaacacgccttttgtcatatctggaagtgtccattcggagcgcattcaggcttgtgttgaaaaaggaaatatcctcccataaaaactagacagaagcattctcagaaacttatctgtgatgtatgtactcaactaacagaactaaaccatcgttttgaaggagcagttttgaaacactctttttgcggaatctgcaagtggatatttggctagctgggaggatttcgttggaaacgggattacatacaaaaagcagacagcagcattctcagaaacttctttgtgatgtttgcattcaagtcacagagttgaacattccctttcatagagcaggtttgaaacactctttttgtagtatctggatgtggacatttggatcgctttcaggcctatggtgaaaaaggaaatatcttcccatgaaaactagacagaagcattctcagaaacttatttgtgatgtgtgccctcaactgacagtgttgaacctttgttttgatagagcagttctgaaacacactttttgtaaaatctgcaagaggatatttggatagctttgaggatttcgttggaaacgggaatgtcttcatgtaaactctacacagaagcattctcagaaactgctttgggatgtttcaattgaagtcccagtgttgaacattcccattcatagagcaggtttgaaacactctttttgtactatctggaagtggacatttggagcgctttcaggtctacggtgaaaaaggagatatcttccaataaaaactagatagaagcaatgtcagaacttttttcatgatgtatctactcagcaaacagagttgaacctttcttttgagagagcagttttgaaacactctttttgtggaatatgcaagtgggtattaggccagcttggaggatttcgttggaaacgggaatacgtataaaaagcagacagcagcattgtcagaaactactttgtgatgtttgcattcaagtcacagaactgaaaactccctttcacagagcaggtttgaaacactctttttgtagtgtctgtaagtgaacatttggattgctttcaggcctaaggtgaaaaaggaaatatcttcccataaaaactagacagaagcattctcagaaacttgttcgtgatgtgtgccctctactgacagagttgaacctttctttgcaaagagcagttttgaaacactctttttgtagaatctgcaagaggatatttggatagctttgaagatttcttgggaaacgggaatgtcttcagataaactctagacagaagcattctcagaaacttctttgggatgtttcaattgaagtcacagtgttgaacattccctttcacagagcaggtttgaaacactctttttgtagtgtctataagtgaacatttggcgtgctttcaggcctaacgtgaaaaaggaaatatcttcccataaaaactagacagaagcattctcagaaacttgttcgtgatgtgtgccctctactgacagagttgaacctttctttgcaaagagcagctttgaaacactctttttgtagaatctgcaagaggatatttggatagctttgaggatttcgttggaaacgggtatgtcttcagataaactctagacagaagcattctcagaaacttctttgggatgttgcattcaagtcacagagtagaacattcccattcatagagcagatttgaaacactctttttgtagtatctggaagtggacatttggagcgctttcaggcctatgttgaaaaaggaaatatcttcccataaaaactagacggaagcattctcagaaacttacttgtgatgtgtttgctcaactaacagaattgaaccatcgttttgaaggagcagttttgaaacactgttttcgtggaatctgcaagtggatatttggctaactttgaggatttcgttggaaacgggattacatataaaaaggagacagcagcattctcagaaacttctttgtgatgtctgcattcaagtcacagagttgagcattccctttcatagagcaggttggaaacactctttttgtagtatctggatgaggacatttggagcgctttcaggcgtatggtgaaaaaggaaatatcttcccgtaaaaactagacagaagcattctcagaaatttatttgtgatgtgtgccctcaactaacagagttgaacctttcttttgatagagcagttttgaaacactctttttgtaaaatctgcaagaggatatttggatagctttgaggatttcgttgcaaacgggaatggcttcatataaactctagacagaagcattctcagaaacttcgttgggatgtttcgattgaagtcccagtgttgaacattcccttttatagagcaggttggaaacactctttctgcattccctggaagtggacatttggagcgctttcaggacgacggtgaaaatggaaatatcttccaagcaaaatctagatagaagcaacgtcagaaacttttatgtgatggatctactcagctaacagagttgaacctttcttttgagagagcagttttgcaacactctttttgtggaatatgcaagtggatattagggcagctttgaggatttcgttggaaacgggaatacatgtaaaaagcagacagcagcattctcagaaacttctttgtgatgtttgcattgaagtcacagagttgaacattccctttgagagagcaggtttgaaacacgcctttcgtcatatctggaagtgtccattcggagcgcattcaggcttgtgttgaaaaaggaaatatcctcccataaaaactagacagaagcattctcagaaacttatctgtgatgtatgtactcaactaacagaactaaaccatcgttttgaaggagcagttttgaaacactctttttgcggaatctgcaagtggatatttggctagctgggaggatttcgttggaaacgggattacatacaaaaagcagacagcagcattctcagaaacttctttgtgatgtttgcattcaagtcacagagttgaacattccctttcatagagcaggtttgaaacactctttttgtagtatctggatgtggacatttggatcgctttcaggcctatggtgaaaaaggaaatatcttcccatgaaaactagacagaagcattctcagaaacttatttgtgatgtgtgccctcaactgacagtgttgaacctttgttttgatagagcagttctgaaacacactttttgtaaaatctgcaagaggatatttggatagctttgaggatttcgttggaaacgggaatgtcttcatgtaaactctagacagaagcattctcagaaactgctttgggatgtttcaattgaagtcccactgttgaacattccctttcatagagcaggtttgaaacactctttttgtactatctggaagtggacatttggagcgctttcaggtctacggtgaaaaaggagatatcttccaataaaaactagatagaagcaatgtcagaacttttttcatgatgtatctactcagcaaacagagttgaacctttcttttgagagagcagttttgaaacactctttttgtggaatatgcaagtgggtattaggccagcttggaggatttcgttggaaacgggaatacgtataaaaagcagacagcagcattgtcagaaactactttgtgatgtttgcattcaagtcacagaactgaacactccctttcacagagcaggtttgaaacactctttttgtagtgtctgtaagtgaacatttggattgctttcaggcctaaggtgaaaaaggaaatatcttcccataaaaactagacagaagcattctcagaaacttgtttgtgatgtgtgccctctactgacagagttgaacctttctttgcaaagagcagttttgaaacactctttttgtagaatctgcaagaggatatttggatagctttgaggatttcttgggaaacgggaatgtcttcagataaactctagacagaagcattctcagaaacttctttgggatgtttcaattgaagtcacagtgttgaacattccctttcacagagcaggtttgaaacactctttttgtagtgtctataagtgaacatttggcgtgctttcaggcctaaggtgaaaaaggaaatatacttcccataaaaactagacagaagcattctcagaaacttgttcatgatgtgtgccctctactgacagagttgaacctttctttgcaaagagcagctttgaaacactctttttgtagaatctgcaagaggatatttggatagctttgaggatttcgttggaaacgggtatgtcttcagataaactctagacagaagcattctcagaaacttctttgggatgttgcattcaagtcacagagtagaacattcccattcatagagcagatttgaaacactctttttgtagtatctggaagtggacatttggagcgctttcaggcctatgttgaaaaaggaaatatcttcccataaaaactagacggaagcattctcagaaacttacttgtgatgtgtttgctcaactaacagaattgaaccatcgttttgaaggagcagttttgaaacactgttttcgtggaatctgcaagtggatatttggctagctttgaggatttcgttggaaacgggattacatataaaaaggagacagcagcattctcagaaacttctttgtgatgtctgcattcaagtcacagagttgagcattccctttcatagagcaggttggaaacactctttttgtagtatctggatgaggacatttggagcgctttcaggcgtatggtgaaaaaggaaatatcttcccgtaaaaactagacagaagcattctcagaaatttatttgtgatgtgtgccctcaactaacagagttgaacctttcttttgatagagcagttttgaaacactctttttgtaaaatctgcaagaggatatttggatagctttgaggatttcattgcaaacgggaatggcttcatataaactctagacagaagcattctcagaaacttcgttgggatgtttcgattgaagtcccagtgttgaacattcccttttatagagcaggttggaaacactctttctgcattccctggaagtggacatttggagcgctttcaggacgacggtgaaaatggaaatatcttccaagaaaatctagatagaagcaatgtcagaaacttttatgtgatggatctactcagctaacagagttgaacctttcttttgagagagcagttttgcaacactctttttgtggaatatgcaagtggatattagggcagctttgaggatttcgttggaaacgggaatacatgtaaaaagcagacagcagcattctcagaaacttctttgtgatgtttgcattgaagtcacagagttgaacattccctttgagagagcaggtttgaaacacgccttttgtcatatctggaagtgtccattcggagcgcattcaggcttgtgttgaaaaaggaaatatcctcccataaaactagacagaagcattctcagaaacttatctgtgatgtatgtactcaactaacagaactaaaccatcgttttgaaggagcagttttgaaacactctttttgcggaatctgcaagtggatatttggctagctgggaggatttcgttggaaacgggattacatacaaaaagcagacagcagcattctcagaaacttctttgtgatgtttgcattcaagtcacagagttgaacattccctttcatagagcaggtttgaaacactctttttgtagtatctggatgtggacatttggatcgctttcaggcctatggtgaaaaaggaaatatcttcccatgaaaactagacagaagcattctcagaaacttatttgtgatgtgtgccctcaactgacagtgttgaacctttgttttgatagagcagttctgaaacacactttttgtaaaatctgcaagaggatatttggatagctttgaggatttcgttggaaacgggaatgtcttcatgtaaactctagacagaagcattctcagaaactgctttgggatgtttcaattgaagtcccagtgttgaacattccctttcatagagcaggtttgaaacactctttttgtactatctggaagtggacatttggagcgctttcaggtctacggtgaaaaaggagatatcttccaataaaaactagatagaagcaatgtcagaacctttttcatgatgtatctactcagcaaacagagttgaacctttcttttgagagagcagttttgaaacactctttttgtggaatatgcaagtgggtattaggccagcttggaggatttcgttggaaacgggaatacgtataaaaagcagacagcagcattgtcagaaactactttgtgatgtttgcattcaagtcacagaattgaacactccctttcacagagcaggtttgaaacactctttttgtagtgtctgtaagtgaacatttggattgctttcaggcctaaggtgaaaaaggaaatatcttcccataaaaactagacagaagcattctcagcaacttgtttgtgatgtgtgccctctactgacagagttgaacctttctttgcaaagagcagttttgaaacactctttttgtagaatctgcaagaggatatttggatagctttgaggatttcttgggaaacgggaatgtcttcagataaactctagacagaagcattctcagaaacttctttgggatgtttcaattgaagtcacagtgttgaacattccctttcacagagcaggtttgaaacactctttttgtagtgtctataagtgaacatttggcgtgctttcaggcgtaacgtgaaaaaggaaatatcttcccataaaaactagacagaagcattctcagaaacttgttcgtgatgtgtgccctctactgacagagttgaacctttctttgcaaagagcagctttgaaacacactttttgtagaatctgcaagaggatatttggatagctttgaggatttcgttggaaacgggtatgtcttcagataaactctagacagaagcattctcagaaatttctttgggatgttgcatgcaagtcacagagtagaacattcccattcatagagcagatttgaaacactctttttgtactatctggaagtggacatttggagcgctttcaggcctatgttgaaaaaggaaatatcttcccataaaaactagacggaagcattctcagaaacttaattgtgatgagtttgctcaactaacaggattgaaccatccttttgaaggagcagttttgaaacactgttttcgtggaatctgcaagtggatatttggctagctttgaggatttcgttggaaacgggattacatataaaaaggagacagcagcattctcagaaacttctttgtgatgtctgcatttaattcacagagttgagcattccctttcatagagcaggttggaaacactctttttgtagtatctggatgaggacatttggagcgctttcaggcgtatggtgaaaagggaaatatcttcccgtaaaaactagacagaagcattctcagaagtttatttgtgatgtgtgccctcaactaacagagttgaacctttcttttgatagagcagttttgaaacactctttttgtaaaatctgcaagaggatatttggatagctttgaggatttcgttgcaaacgggaatggcttcatataaactctagacagaagcattctcagaaacttcgttgggatgtttcgattgaagtcccagtgttgaacattcccttttatagagcaggttggaaacactctttctgcattccctggaagtggacatttggagcgctttcaggacgacggtgaaaatggaaatatcttccaagaaaatctagatagaagcaatgtcagaaacttttatgtgatggatctactcagctaacagagttgaacctttcttttgagagagcagttttgcaacactctttttgtggaatatgcaagtggatattagggcagctttgaggatttcgttggaaacgggaatacatgtaaaaagcagacagcagcattctcagaaacttctttgtgatgtttgcattgaagtcacagagttgaacattccctttgagagagcaggtttgaaacacgccttttgtcatatctggaagtgtccattcggagcgcattcaggcttgtgttgaaaaaggaaatatcctcccataaaaactagacagaagcattctcagaaacttatctgtgatgtatgtactcaactaacagaactaaaccatcgttttgaaggagcagttttgaaacactctttttgcggaatctgcaagtggatatttggctagctgggaggatttcgttggaaacgggattacatacaaaaagcagacagcagcattctcagaaacttctttgtgatgtttgcattcaagtcacagagttgaacattccctttcatagagcaggtttgaaacactctttttgtagtatctggatgtggacatttggatcgctttcaggcctatggtgaaaaaggaaatatcttcccatgaaaactagacagaagcattctcagaaacttatttgtgatgtgtgccctcaactgacagtgttgaacctttgttttgatagagcagttctgaaacacactttttgtaaaatctgcaagaggatatttggatagcttgaggatttcgttggaaacgggaatgtcttcatgtaaactctacacagaagcattctcagcaaactgctttgggatgtttcaattgaagtcccagtgttgaacattcccattcatagagcaggtttgaaacactctttttgtactatctggaagtggacatttggagcgctttcaggtgtacggtgaaaaaggagatatcttccaataaaaactagatagaagcaatgtcagaacttttttcatgatgtatctactcagctaacagagttgaacctttcttttgagagagcagttttgaaacactctttttgtggaatatgcaagtgggtattaggccagcttggaggatttcgttggaaacgggaatacgtataaaaagcagacagcagcattgtcagaaactactttgtgatgtttgcattcaagtcacagaattgaacactccctttcacagagcaggtttgaaacactctttttgtagtgtctataagtgaacatttggcgtgctttcaggcctaaggtgaaaaaggaaatatcttcccataaaaactagacagaagcattctcagaaacttgttcgtgatgtgtgccctctactgacagagttgaacctttctttgcaaagagcagctttgaaacactctttttgtagaatctgcaagaggatatttggatagctttgaggatttcgttggaaacgggtatgtcttcagataaactctagacagaagcattctcagaaacttctttgggatgttgcattcaagtcacagagtagaacattcccattcatagagcagatttgaaacactctttttgtagtatctggaagtggacatttggagcgctttcaggcctatgttgaaaaaggaaatatcttcccataaaaactagacggaagcattctcagaaacttacttgtgatgtgtttgctcaactaacagaattgaaccatcgttttgaaggagcagttttgaaacactgttttcgtggaatctgcaagtggatatttggctagctttgaggatttcgttggaaacgggattacatataaaaaggagacagcagcattctcagaaacttctttgtgatgtctgcattcaagtcacagagttgagcattccctttcatagagcaggttggaaacactctttttgtagtatctggatgaggacatttggagcgctttcaggcgtatggtgaaaaaggaaatatcttcccgtaaaaactagacagaagcattctcagaaatttatttgtgatgtgtgccctcaactaacagagttgaacctttcttttgatagagcagttttgaaacactctttttgtaaaatctgcaagaggatatttggatagctttgaggatttcgttgcaaacgggaatggcttcatataaactctagacagaagcattctcagaaacttcgttgggatgtttcgattgaagtcccagtgttgaacattcccttttatagagcaggttggaaacactctttctgcattccctggaagtggacatttggagcgctttcaggacgacggtgaaaatggaaatatcttccaagaaaatctagatagaagcaacgtcagaaacttttctgtgatggatctactcagctaacagagttgaacctttcttttgagagagcagttttgcaacactctttttgtggaatatgcaagtggatattagggcagctttgaggatttcgttggaaacgggaatacatgtaaaaagcagacagcagcattctcagaaacttctttgtgatgtttgcattgaagtcacagagttgaacattccctttgagagagcaggtttgaaacacgccttttgtcatatctggaagtgtccattcggagcgcattcaggcttgtgttgaaaaaggaaatatcctcccataaaaactagacagaagcattctcagaaacttatctgtgatgtatgtactcaactaacagaactaaaccatcgttttgaaggagcagttttgaaacactctttttgcggaatctgcaagtggatatttggctagctgggaggatttcgttggaaacgggattacatacaaaaagcagacagcaaagcattctcagaaacttatttgtgatgtgtgccctcaactgacagtgttgaacctttgttttgatagagcagttctgaaacacactttttgtaaaatctgcaagaggatatttggatagctttgaggatttcgttggaaacgggaatgtcttcatgtaaactctacacagaagcattctcagaaactgctttgggatgtttcaattgaagtcccagtgttgaacattcccattcatagagcaggtttgaaacactctttttgtactatctggaagtggacatttggagcgctttcaggtctacggtgaaaaaggagatatcttccaataaaaactagatagaagcaatgtcagaacttttttcatgatgtatctactcagcaaacagagttgaacctttcttttgagagagcagttttgaaacactctttttgtggaatatgcaagtgggtattaggccagcttggaggatttcgttggaaacgggaatacgtataaaaagcagacagcagcattgtcagaaactactttgtgatgtttgcattcaagtcacagaattgaacactccctttcacagagcaggtttgaaacactctttttgtagtgtctgtaagtgaacatttggattgctttcaggcctaaggtgaaaaaggaaatatcttcccataaaaactagacagaagcattctcagaaacttgtttgtgatgtgtgccctctactgacagagttgaacctttctttgcaaagagcagttttgaaacactctttttgtagaatctgcaagaggatatttggatagctttgaggatttcttgggaaacgggaatgtcttcagataaactctagacagaagcattctcagaaacttctttgggatgtttcaattgaagtcacagtgttgaacattccctttcacagagcaggtttgaaacactctttttgtagtgtctataagtgaacatttggcgtgctttcaggcgtaacgtgaaaaaggaaatatcttcccataaaaaccagacagaagcattctcagaaacttgttcgtgatgtgtgccctctactgacagagttgaacctttctttgcaaagagcagctttgaaacactctttttgtagaatctgcaagaggatatttggatagctttgaggatttcgttggaaacgggtatgtcttcagataaactctagacagaagcattctcagaaacttctttgggatgttgcattcaagtcacagagtagaacattcccattcatagagcagatttgaaacactctttttgtagtatctggaagtggacatttggagcgctttcaggcctatgttgaaaaaggaaatatcttcccataaaaactagacggaagcattctcagaaacttacttgtgatgtgtttgctcaactaacagaattgaaccatcgttttgaaggagcagttttgaaacactgttttcgtggaatctgcaagtggatatttggctagctttgaggatttcgttggaaacgggattacatataaaaaggagacagcagcattctcagaaacttctttgtgatgtctgcattcaagtcacagagttgagcattccctttcatagagcaggttggaaacactctttttgtagtatctggatgaggacatttggagcgctttcaggcctatggtgaaaaaggaaatatcttcccgtaaaaactagacagaagcattctcagaaatttatttgtgatgtgtgccctcaactaacagagttgaacctttcttttgatagagcagttttgaaacactctttttgtaaaatctgcaagaggatatttggatagctttgaggatttcgttgcaaacgggaatggcttcatataaactctagacagaagcattctcagaaacttcgttgggatgtttcgattgaagtcccagtgttgaacattcccttttatagagcaggttggaaacactctttctgcattccctggaagtggacatttggagcgctttcaggacgacggtgaaaatggaaatatcttccaagaaaatctagatagaagcaatgtcagaaacttttatgtgatggatctactcagctaacagagttgaacctttcttttgagagagcagttttgcaacactctttttgtggaatatgcaagtggatattagggcagctttgaggatttcgttggaaacgggaatacatgtaaaaagcagacagcagcattctcagaaacttctttgtgatgtttgcattgaagtcacagagttgaacattccctttgagagagcaggtttgaaacacgccttttgtcatatctggaagtgtccattcggagcgcattcaggcttgtgttgaaaaaggaaatatcctcccataaaaactagacagaagcattctcagaaacttatctgtgatgtatgtactcaactaacagaactaaaccatcgttttgaaggagcagttttgaaacactctttttgcggaatctgcaagtggatatttggctagctgggaggatttcgttggaaacgggattacatacaaaaagcagacagcagcattctcagaaacttctttgtgatgtttgcattcaagtcacagagttgaacattccctttcatagagcaggtttgaaacactctttttgtagtatctggatgtggacatttggatcgctttcaggcctatggtgaaaaaggaaatatcttcccatgaaaactagacagaagcattctcagaaacttatttgtgatgtgtgccctcaactgacagtgttgaacctttgttttgatagagcagttctgaaacacactttttgtaaaatctgcaagaggatatttggatagctttgaggatttcgttggaaacgggaatgtcttcatgtaaactctacacagaagcattctcagaaactgctttgggatgtttcaattgaagtcccagtgttgaacattcccattcatagagcaggtttgaaacactctttttgtactatctggaagtggacatttggagcgctttcaggtctacggtgaaaaaggagatatcttccaataaaaactagatagaagcaatgtcagaacttttttcatgatgtatctactcagctaacagagttgaacctttcttttgagagagcagttttgaaacactctttttgtggaatatgcaagtgggtattaggccagcttggaggatttcgttggaaacgggaatacgtataaaaagcagacagcagcattgtcagaaactactttgtgatgtttgcattcaagtcacagaattgaacactccctttcacagagcaggtttgaaacactctttttgtagtgtctgtaagtgaacatatggattgctttcaggcctaaggtgaaaaaggaaatatcttcccataaaaactagacagaagcattctcagaaacttgtttgtgatgtgtgccctctactgacagagttgaacctttctttgcaaagaccagttttgaaacactctttttgtagaatctgcaagaggatatttggatagctttgaggatttcttgggaaacgggaatgtcttcagataaactctagacagaagcattctcagaaacttctttgggatgtttcaattgaagtcacagtgttgaacattccctttcacagagcaggtttgaaacactctttttgtagtgtctataagtgaacatttggcgtgctttcaggcctaacgtgaaaaaggaaatatcttcccataaaaactagacagaagcattctcagaaacttgttcgtgatgtgtgccctctactgacagagttgaacctttctttgcaaagagcagctttgaaacactctttttgtagaatctgcaagaggatatttggatagctttgaggatttcgttggaaacgggtatgtcttcagataaactctagacagaagcattctcagaaacttctttgggatgttgcattcaagtcacagagtagaacattcccattcatagagcagatttgaaacactctttttgtagtatctggaagtggacatttggagcgctttcaggcctatgttgaaaaaggaaatatcttcccataaaaactagacggaagcattctcagaaacttatttgtgatgtgtttgctcaactaacaggattgaaccatcgttttgaaggagcagttttgaaacactgttttcgtggaatctgcaagtggatatttggctagctttgaggatttcgttggaaacgggattacatataaaaaggagacagcagcattctcagaaacttctttgtgatgtctgcattcaattcacagagttgagcattccctttcatagagcaggttggaaacactctttttgtagtatctggatgaggacatttggagcgctttcaggcgtatggtgaaaaaggaaatatcttccctgtaaaaactagacagaagcattctcagaagtttatttgtgatgtgtgccctcaactaacagagttgaacctttcttttgatagagcagttttgaaacactctttttgtaaaatctgcaagaggatatttggatagctttgaggatttcgttgcaaacgggaatggcttcatataaactctagacagaagcattctcagaaacttcgttgggatgtttcgattgaagtcccagtgttgaacattcccttttatagagcaggttggaaacactctttctgcattccctggaagtggacatttggagcgctttcaggacgacggtgaaaatggaaatatcttccaagaaaatctagatagaagcaatgtcagaaacttttatgtgatggatctactcagctaacagagttgaacctttcttttgagagagcagttttgcaacactctttttgtggaatatgcaagtggatattagggcagctttgaggatttcgttggaaacgggaatacatgtaaaaagcacacagcagcattctcagaaacttctttgtgatgtttgcattgaagtcacagagttgaacattccctttgagagagcaggtttgaaacacgccttttgtcatatctggaagtgtccattcggagcgcattcaggcttgtgttgaaaaaggaaatatcctcccataaaaactagacagaagcattctcagaaacttatctgtgatgtatgtactcaactaacagaactaaaccatcgttttgaaggagcagttttgaaacactctttttgcggaatctgcaagtggatatttggctagctgggaggatttcgttggaaacgggattacatacaaaaagcagacagcagcattctcagaaacttctttgtgatgtttgcattcaagtcacagagttgaacattccctttcatagagcaggtttgaaacactctttttgtagtatctggatgtggacatttggatcgctttcaggcctatggtgaaaaaggaaatatcttcccatgaaaactagacagaagcattctcagaaacttatttgtgatgtgtgccctcaactgacagtgttgaacctttgttttgatagagcagttctgaaacacactttttgtaaaatctgcaagaggatatttggatagctttgaggatttcgttggaaacgggaatgtcttcatgtaaactctacacagaagcattctcagaaactgctttgggatgtttcaattgaagtcccagtgttgaacattcccattcatagagcaggtttgaaacactctttttgtactatctggaagtggacatttggagcgctttcaggtctacggtgaaaaaggagatatcttccaataaaaactagatagaagcaatgtcagaacttttttcatgatgtatctactcagcaaacagagttgaacctttcttttgagagagcagttttgaaacactctttttgtggaatatgaaagtgggtattaggccagcttggaggatttcgttggaaacgggaatacgtataaaaagcagacagcagcattgtcagaaactactttgtgatgtttgcattcaagtcacagaactgaacactccctttcacagagcaggtttgaaacactctttttgtagtgtctgtaagtgaacatttggattgctttcaggcctaaggtgaaaaaggaaatatcttcccataaaaactagacagaagcattctcagaaacttgtttgtgatgtgtgccctctactgacagagttgaacctttctttgcaaagagcagttttgaaacactctttttgtagaatctgcaagaggatatttggatagctttgaggatttcttgggaaacgggaatgtcttcagataaactctagacagaagcattctcagaaacttctttgggatgtttcaattgaagtcacagtgttgaacattccctttcacagagcaggtttgaaacactctttttgtagtgtctataagtgaacatttggcgtgctttcaggcctaacgtgaaaaaggaaatatcttcccataaaaactagacagaagcattctcagaaacttgttcgtgatgtgtgccctctactgacagagttgaacctttctttgcaaagagcagctttgaaacacactttttgtagaatctgcaagaggatatttggatagcttggaggatttcgttggaaacgggtatgtcttcagataaactctagacagaagcattctcagaaacttctttgggatgttgcattcaagtcacagagtagaacattcccattcatagagcagatttgaaacactctttttgtagtatctggaagtggacatttggagcgctttcaggcctatgttgaaaaaggaaatatcttcccataaaaactagacggaagcattctcagaaacttatttgtgatgagtttgctcaactaacaggattgaaccatcgttttgaaggagcagttttgaaacactgttttcgtggaatctgcaagtggatatttggctagctttgaggatttcgttggaaacgggattacatataaaaaggagacagccagcattctcagaaacttctttgtgatgtctgcattcaagtcacagacttgagcattccctttcatagagcaggttggaaacactctttttgtagtatctggatgaggacatttggagcgctttcaggcgtatggtgaaaaaggaaatatcttcccgtaaaaactagacagaagcattctcagaaatttatttgtgatgtgtgccctcaactaacagagttgaacctttcttttgatagagcagttttgaaacactctttttgtaaaatctgcaagaggatatttggatagctttgaggatttcgttgcaaacgggaatggcttcatataaactctagacagaagcattctcagaaacttcgttgggatgtttcgattgaagtcccagtgttgaacattccctttcatagagcaggttggaaacactctttctgcattccctggaagtggacatttggagcgctttcaggacgacggtgaaaatggaaatatcttccaagaaaatctagatagaagcaacgtcagaaacttttatgtgatggatctactcagctaacagagttgaagctttcttttgagagagcagttttgcaacactctttttgtggaatatgcaagtggatattagggcagctttgaggatttcgttggaaacgggaatacatgtaaaaagcagacagcagcattctcagaaacttctttgtgatgtttgcattgaagtcacagagttgaacattccctttgagagagcaggtttgaaacacgccttttgtcatatctggaagtgtccattcggagcgcattcaggcttgtgttgaaaaaggaaatatcctcccataaaaactagacagaagcattctcagaaacttatctgtgatgtatgtactcaactaacagaactaaaccatcgttttgaaggagcagttttgaaacactctttttgcggaatctgcaagtggatatttggctagctgggaggatttcgttggaaacgggattacatacaaaaagcagacagcagcattctcagaaacttctttgtgatgtttgcattcaagtcacagagttgaacattccctttcatagagcaggtttgaaacactctttttgtagtatctggatgtggacatttggatcgctttcaggcctatggtgaaaaaggaaatatcttcccatgaaaactagacagaagcattctcagaaacttatttgtgatgtgtgccctcaactgacagtgttgaacctttgttttgatagagcagttctgaaacacactttttgtaaaatctgcaagaggatatttggatagctttgaggatttcgttggaaacggaaatgtcttcatgtaaactctacacagaagcattctcagaaactgctttgggatgtttcaattgaagtcccagtgttgaaccttcccattcatagagcaggtttgaaacactctttttgtactatctggaagtggacatttggagcgctttcaggtctacggtgaaaaaggagatatcttccagtaaaaactagatagaagcaatgtcagaacttttttcatgatatatctactcagctaacagagttgaacctttcttttgagagagcagttttgaaacactctttttgtggaatatgcaagtgggtattaggccagcttggaggatttcgttggaaacgggaatacgtataaaaagcagacagcagcattgtcagaaactactttgtgatgtttgcattcaagtcacagaattgaacactccctttcacagagcaggtttgaaacactctttttgtagtgtctgtaagtgaacatatggattgctttcaggcctaaggtgaaaaaggaaatatcttcccataaaaactagacagaagcattctcagaaacttgtttgtgatgtgtgccctctactgacagagttgaacctttctttgcaaagagcagttttgaaacactctttttgtagaatctgcaagaggatatttggatagctttgaagatttcttgggaaacgggaatgtcttcagataaactctagacagaagcattctcagaaacttctttgggatgtttcaattgaagtcacagtgttgaacattccctttcacagagcaggtttgaaacactctttttgtagtgtgtataagtgaacatttggcgtgctttcaggcctaacgtgaaaaaggaaatatcttcccataaaaactagacagaagcattctcagaaacttgttcatgatgtgtgccctctactgacagagttgaacctttctttgcaaagagcagctttgaaacactctttttgtagaatctgcaagaggatatttggatagctttgaggatttcgttggaaacgggtatgtcttcagataaactctagacagaagcattctcagaaacttctttgggatgttgcattcaagtcacagagtagaacattcccattcatagagcagatttgaaacactctttttgtagtatctggaagtggacatttggagcgctttcaggcctatgttgaaaaaggaaatatcttcccataaaaactagacggaagcattctcagaaacttacttgtgatgtgtttgctcaactaacagaattgaaccatcgttttgaaggagcagttttgaaacactgtttttgtggaatctgcaagtggatatttggctagctttgaggatttcgttggaaacgggattacatatacaaaggagacagcagcattctcagaaacttctttgtgatgtctgcattcaagtcacagagttgagcattccctttcatagagcaggttggaaacactctttttgtagtatctggatgaggacatttggagcgctttcaggcctatggtgaaaaaggaaatatcttcccgtaaaaactagacagaagcattctcagaaatttatttgtgatgtgtgccctcaactaacagagttgaacctttcttttgatagagcagttttgaaacactctttttgtaaaatctgcaagaggatatttggatagctttgaggatttcgttgcaaacgggaatggcttcatataaactctagacagaagcattctcagaaacctcgttgggatgtttcgattgaagtcccagtgttgaacattcccttttatagagcaggttggaaacactctttctgcattccctggaagtggacatttggagcgctttcaggacgacggtgaaaatggaaatatcttccaagaaaatctagatagaagcaacgtcagaaacttttctgtgatggatctactcagctaacagagttgaacctttcttttgagagagcagttttgcaacactctttttgtggaatatgcaagtggatattagggcagctttgaggatttcgttggaaacgggaatacatgtaaaaagcagacagcagcattctcagaaacttctttgtgatgtttgcattgaagtcacagagttgaacattccctttgagagagcaggtttgaaacacgccttttgtcatatctggaagtgtccattcggagcgcattcaggcttgtgttgaaaaaggaaatatcgtcccataaaaactagacagaagcattctcagaaacttatctgtgatgtatgtactcaactaacagaactaaaccatcgttttgaaggagcagttttgaaacactctttttgcggaatctgcaagtggatatttggctagctgggaggatttcgttggaaacgggattacatacaaaaagcagacagcagcattctcagaaacttctttgtgatgtttgcattcaagtcacagagttgaacattccctttcatagagcaggtttgaaacactctttttgtagtatctggatgtggacatttggatcgctttcaggcctatggtgaaaaaggaaatatcttcccatgaaaactagacagaagcattctcagaaacttatttgtgatgtgtgccctcaactgacagtgttgaacctttgttttgatagagcagttctgaaacacactttttgtaaaatctgcaagaggatatttggatagctttgaggatttcgttggaaacgggaatgtcttcatgtaaactctggacagaagcattctcagaaactgctttgggatgtttcaattgaagtcccagtgttgaacattcccattcatagagcaggtttgaaacactctttttctactatctggaagtggacatttggagcgctttcaggtctacggtgaaaaaggagatatcttccaataaaaactagatagaagcaatgtcagaacttttttcatgatgtatctactcagcaaacagagttgaacctttcttttgagagagcagttttgacactgtctttgtggaatatgcaagtgggtattaggccagcttggaggatttcgttggaaacgggaatacgtataaaaagcagacagcagcattgtcagaaactactttgtgatgtttgcattcaagtcacagaattgaacactccctttcacagagcaggtttgaaacactctttttgtagtgtctgtaagtgaacatatggattgctttcaggcctaaggtgaaaaaggaaatatcttcccataaaaactagacagaagcattctcagaaacttgtttgtgatgtgtgccctctactgacagagttgaacctttctttgcaaagagcagttttgaaacactctttttgtagaatctgcaagaggatatttggatagctttgaggatttcttgggaaacgggaatgtcttcagataaactctagacagaagcattctcagaaacttctttgggatatttcaattgaagtcacagtgttgaacattccctttcacagagcaggtttgaaacactctttttgtagtgtctataagtgaacatttggcgtgctttcaggcctaacgtgaaaaaggaaatatcttcccataaaaactagacagaagcattctcagaaacttgttcgtgatgtgtgccctctactgacagagttgaacctttctttgcaaagagcagctttgaaacacactttttgtagaatctgcaagaggatatttggatagctttgaggatttcgttggaaacgggtatgtcttcagataaactctagacagaagcattctcagaaacttctttgggatgttgcattcaagtcacagagtagaacattcccattcatagagcagatttgaaacactctttttgtagtatctggaagtggacatttggagcgctttcaggcctatgttgaaaaaggaaatatcttcccataaaaactagacggaagcattctctgaaacttatttgtgatgtgtttgctcaactaacaggattgaaccatcgttttgaaggagcagttttgaaacactgttttcgtggaatctgcaagtggatatttggctagctttgaggatttcgttggaaacgggattacatataaaaaggagacagcagcattctcagaaacttctttgtgatgtctgcattcaattcacagagttgagcattccctttcatagagcaggttggaaacactctttttgtagtatctggatgaggacatttggagcgctttcaggcgtatggtgaaaaaggaaatatcttcccgtaaaaactagacagaagcattctcagaagtttatttgtgatgtgtgccctcaactaacagagttgaacctttcttttgatagagcagttttgaaacactctttttgtaaaatctgcaagaggatatttggatagctttgaggatttcgttgcaaacgggaatggcttcatataaactctagacagaagcattctcagaaacttcgttgggatgtttcgattgaagtcccagtgttgaacattcccttttatagagcaggttggaaacactctttctgcattccctggaagtggacatttggagcgctttcaggacgacggtgaaaatggaaatatcttccaagaaaatctagatagaagcaatgtcagaaacttttatgtgatggatctactcagctaacagagttgaacctttcttttgagagagcagttttgcaacactctttttgtggaatatgcaagtggatattagggcagctttgaggatttcgttggaaacgggaatacatgtaaaaagcagacagcagcattctcagaaacttctttgtgatgtttgcattgaagtcacagcagttgaacattccctttgagagagcaggtttgaaacacgccttttgtcatatctggaagtgtccattcggagcgcattcaggcttgtgttgaaaaaggaaatatcctcccataaaaactagacagaagcattctcagaaacttatctgtgatgtatgtactcaactaacagaactaaaccatcgttttgaaggagcagttttgaaacactctttttgcggaatctgcaagtggatatttggctagctgggaggatttcgttggaaacgggattacatacaaaaagcagacagcagcattctcagaaacttctttgtgatgtttgcattcaagtcacagagttgaacattccctttcatagagcaggtttgaaacactctttttgtactatctggatgtggacatttggatcgctttcaggcctatggtgaaaaaggaaatatcttcccatgaaaactagacagaagcattctcagaaacttatttgtgatgtgtgccctcaactgacagtgttgaacctttgttttgatagagcagttctgaaacacactttttgtaaaatctgcaagaggatatttggatagctttgaggatttcgttggaaacgggaatgtcttcatgtaaactctagacagaagcattctcagtaaactgctttgggatgtttcaattgaagtcccagtgttgaacattccctttcatagagcaggtttgaaacactctttttgtactatctggaagtggacatttggagcgctttcaggtctacggtgaaaaaaggagatatcttccaataaaaactagatagaagcaatgtcagaacttttttcatgatgtatctactcagcaaagagagttgaacctttcttttgagagagcagttttgaaacactctttttgtggaatatgcaagtgggtattaggccagcttggaggatttcgttggaaacgggaatacgtataaaaagcagacagccagcattgtcagaaactactttgtgatgtttgcattcaagtcacagaattgaacactccctttcacagagcaggtttgaaactctctttttgtagtgtctataagtgaacatttggcgtgctttcaggcgtaacgtgaaaaaggaaatatcttcccataaaaactagacagagcattctcagaaacttgttcgtgatgtgtgccctctactgacagagttgaacctttctttgcaaagagcagttttgaaacactctttttgtagaatctgcaagaggatatttggatagctttgaggatttcttgggaaacgggaatgtcttcagataaactctagacagaagcattctcagaaacttctttgggatgtttcaattgaagtcacagtgttgaacattccctttcacagagcaggtttgaaacactctttttgtagtgtctataagtgaacatttggcgtgctttcaggcgtaacgtgaaaaaggaaatatcttcccataaaaaccagacagaagcattctcagaaacttgttcgtgatgtgtgccctctactgacagagttgaacctttctttgcaaagagcagctttgaaacactctttttgtagaatctgcaagaggatatttggatagctttgaggatttcgttggaaacgggtatgtcttcagataaactctagacagaagcattctcagaaacttctttgggatgttgcattcaagtcacagagtagaacattcccattcatagagcagatttgaaacactctttttgtagtatctggaagtggacatttggagcgctttcaggcctatgttgaaaaaggaaatatcttcccataaaaactagacggaagcattctcagaaacttacttgtgatgtgtttgctcaactaacagaattgaaccatcgttttgaaggagcagttttgaaacactgttttcgtggaatctgcaagtggatatttggctagctttgaggatttcgttggaaacgggattacatataaaaaggagacagcagcattctcagaaacttctttgtgatgtctgcattcaagtcacagagttgatcattgcctttcatagagcaggtttgaaacactctttttgtagtatctggatgaggacatttggagcgctttcaggcgtatggtgaaaaaggaaatatcttcccgtaaaaactagacagaagcattctcagaaatttatttgtgatgtgtgccctcaactaacagagttgaacctttcttttgatagagcagttttgaaacactctttttgtaaaatctgcaagaggatatttggatggctttgaggatttcgttgcaaacgggaatggcttcatataaactctagacagaagcattctcagaaacttcgttgggatgtttcgattgaagtcccagtgttgaacattcccttttatagagcaggttggaaacactctttctgcattccctggaagtggacatttggagcgctttcaggacgacggtgaaaatggaaatatcttccaagaaaatctagatagaagcaacgtcagaaacttttatgtgatggatctactcagctaacagagttgaacctttcttttgagagagcagttttgcaacactctttttgtggaatatgcaagtggatattagggcagctttgaggatttcgttggaaacgggaatacatgtaaaaagcagacagcagcattctcagaaacttctttgtgatgtttgcattgaagtcacagagttgaacattccctttgagagagcaggtttgaaacacgccttttgtcatatctggaagtgtccattcggagcgcattcaggcttgtgttgaaaaaggaaatatcctcccataaaaactaggacggaagcattctcagaaacttatctgtgatgtatgtactcaactaacagaactaaaccatcgttttgaaggagcagttttgaaacactctttttgcggaatctgcaagtggatatttggctagctgggaggatttcgttggaaacgggattacatacaaaaagcagacagcagcattctcagaaacttctttgtgatgtttgcattcaagtcacagagttgaacattccctttcatagagcaggtttgaaacactctttttgtagtatctggatgtggacatttggatcgctttcaggcctatggtgaaaaaggaaatatcttcccatgaaaactagacagaagcattctcagaaacttatttgtgatgtgtgccctcaactgacagtgttgaacctttgttttgatagagcagttctgaaacacactttttgtaaaatctgcaagaggatatttggatagctttgaggatttcgttggaaacgggaatgtcttcatgtaaactctagacagaagcattctcagaaactgctttgggatgtttcaattgaagtcccagtgttgaacattcgctttcatagagcaggtttgaaatactctttttgtactatctggaagtggacatttggagcgctttcaggtctacggtgaaaaaggagatatcttccaataaaaactagatagaagcaatgtcagaacttttttcatgatgtatctactcagcaaacagagttgaacctttcttttgagagagcagttttgaaacactctttttgtggaatatgaaagtgggtattaggccagcttggaggatttcgttggaaacgggaatacgtataaaaagcagacagcagcattgtcagaaactactttgtgatgtttgcattcaagtcacagaactgaacactccctttcacagagcaggtttgaaacactctttttgtagtgtctgtaagtgaacatttggattgctttcaggcctaaggtgaaaaaggaaatatcttcccataaaaactagacagaagcattctcagaaacttgtttgtgatgtgtgccctctactgacagagttgaacctttctttgcaaagagcagctttgaaacactctttttgtagaatctgcaagaggatatgtggatagctttgaggatttcgttggaaacgggtatgtcttcagataaactctagacagaagcattctcagaaacttctttgggatgtttcaattgaagtcacagtgttgaacattccctttcacagagcaggtttgaaacactctttttgtagtgtctataagtgaacatttggcgtgctttcaggcctaacgtgaaaaaggaaatatcttcccataaaaactagacagaagcattctcagaaacttgttcatgatgtgtgccctctactgacagagttgaacctttctttgcaaagagcagctttgaaacactctttttgtagaatctgcaagaggatatttggatagcttggaggatttcgttggaaacgggtatgtcttcagataaactctagacagaagcattctcagaaacttctttgggatgttgcattcaagtcacagagtagaacattcccattcatagagcagatttgaaacactctttttgtagtatctggaagtggacatttggagcgctttcaggcctatgttgaaaaaggaaatatcttcccataaaaactagacggaagcattctcagaaacttacttgtgatgtgtttgctcaactaacagaattgaaccatcgttttgaaggagcagttttgaaacactgttttcgtggaatctgcaagtggatatttggctagctttgaggatttcgttggaaacgggattacatataaaaaggagacagcagcattctcagaaacttctttgtgatgtctgcattcaagtcacagagttgagcattccctttcatagagaaggttggaaacactctttttgtagtatctggatgaggacatttggagcgctttcaggcgtatggtgaaaaaggaaatatcttcccgtaaaaactagacagaagcattctcagaaatttatttgtgatgtgtgccctcaactaacagagttgaacctttcttttgatagagcagttttgaaacactctttttgtaaaatctgcaagaggatatttggatagctttgaggatttcgttgcaaacgggaatggcttcatataaactctagacagaaagcattctcagaaacttcgtcgggatgtttcgattgaagtcccagtgttgaacattcccttttatagagcaggttggaaacactctttctgcattccctggaagtggacaattggagcgctttcaggacgacggtgaaaatggaaatatcttccaataaaatctggatagagcaacgtcagaaacttttctgtgatggatctactcagctaacagagttgaacctttcttttgagagagcagttttgcaacactctttttgtggaatatgcaagtggatattagggcagctttgaggatttcgttggaaacgggaatacatgtaaaaagcagacagcagcattctcagaaacttctttgtgatgtttgcattgaagtcacagagttgaacattccctttgagagagcaggtttgaaacacgccttttgtcatatctggaagtgtccattcggagcgcattcaggcttgtgttgaaaaaggaaatatcctcccataaaaactagacagaagcattctcagaaacttatctgtgatgtatgtactcaactaacagaactaaaccatccgttttgaaggagcagttttgaaacactctttttgcggaatctgcaagtggatatttggctagctgggaggatttcgttggaaacgggattacatacaaaaagcagacagcagcattctcagaaacttatttgcgatgtgtgccgtcaactgacagtgttgaacctttgttttgatagagcagttctgaaacacactttttgtaaaatctgcaagaggatatttggatagctttgaggatttcgttggaaacgggaatgtcttcatgtaaactctggacagaagcattctcagaaactgctttgggatgtttcaattgaagtcccagtgttgaacattccctttcatagagcaggtttgaaacactctttttgtactatctggaagtggacatttggagcgctttcaggtctacggtgaaaaaggagatatcttccaataaaaactagatagaagcaatgtcagaacttttttcatgatgtatctactcagcaaacagagttgaacctttcttttgagagagcagttttgaaacactctttttgtggaatatgcaagtgggtattaggccagcttggaggatttcgttggaaacgggaatacgtataaaaagcagacagcagcattgtcagaaactactttgtgatgtttgcattcaagtcacagaattgaacactccctttcacagagcaggtttgaaacactctttttgtagtgtctgtaagtgaacatttggattgctttcaggcctaaggtgaaaaaggaaatatcttcccataaaaactagacagaagcattctcagaaacttgtttgtgatgtgtgccctctactgacagagttgaaactttctttgcaaagagcagttttgaaacactctttttgtagaatctgcaagaggatatttggatagctttgaggatttcttgggaaacgggaatgtcttcagataaactctagacagaagcattctcagaaacttctttgggatgtttcaattgaagtcagtgttgaacattccctttcacagagcaggtttgaaacactctttttgtagtgtctataagtgaacatttggcgtgctttcaggcgtaacgtgaaaaaggaaatatcttcccataaaaactagacagaagcattctcagaaacttgttcttgatgtgtcccctctactgacagagttgaacctttctttgcaaagaacagctttgaaacactctttttgtagaatctgcaagaggatatttggatagcttggaggatttcgttggaaacgggtatgtcttcagataaactctagacagaagcattctcagaaacttctttgggatgttgcattcaagtcacagagtagaacattcccattcatagagcagatttgaaacactctttttgtagtatctggaagtggacatttggagcgctttcaggcctatgttgaaaaaggaaatatcttcccataaaaactagacggaagcattctcagaaacttacttgtgatgtgtttgctcaactaacagaattgaaccatcgttttgaaggagcagttttgaaacactgttttcgtggaatctgcaagtggatatttggctagctttgaggatttcgttggaaacgggattacatgtacaaaggagacagcagcattctcagaaacttctttgtgatgtctgcattcaagtcacagagttgagcattccctttcatagagcaggttggaaacactctttttgtagtatctggatgaggacatttggagcgctttcaggcgtatggtgaaaaaggaaatatcttcccgtaaaaactagacagaagcattctcagaaatttatttgtgatgtgtgccctcaactaacagagttgaacctttcttttgatagagcagttttgaaacactctttttgtaaaatctgcaagaggatatttggatagctttgaggatttcgttgcaaacgggaatggcttcatataaactctagacagaagcattctcagaaacttcgttgggatgtttcgattgaagtcccagtgttgaacattcccttttatagagcaggttggaaacactctttctgcattccctggaagtggacatttggagcgctttcaggacgacggtgaaaatggaaatatcttccaagaaaatctagatagaagcaacgtcagaaacttttctgtgatggatctactcagctaacagagttgaacctttcttttgagagagcagttttgcaacactctttttgtggaatatgcaagtggatattagggcagctttgaggatttcgttggaaacgggaatacatgtaaaaagcagacagcagcattctcagaaacttctttgtgatgtttgcattgaagtcacagagttgaacattccctttgagagagcaggtttgaaacacgccttttgtcatatctggaagtgtccattcggagcgcattcaggcttgtgttgaaaaaggaaatatcctcccataaaaactagacagaagcattctcagaaacttatctgtgatgtatgtactcaactaacagaactaaaccatcgttttgaaggagcagttttgaaacactctttttgcggaatctgcaagtggatatttggctagctgggaggatttcgttggaaacgggattacatacaaaaagcagacagcagcattctcagaaacttaactgtgatgtatgtactcaactaacagaactaaaccatcgttttgaagggcagttttgaaacactctttttgcggaatctgcaagtggatatttggctagctgggaggatttcgttggaaacgggattacatacaaaaagcagacagcagcattctcagaaacttatttgtgatgtgtgcactcaactgacagtgttgaacctttgttttgatagagcagttctgaaacacactttttgtaaaatctgcaagaggatatttggatagctttgaggatttcgttggaaacgggaatgtcttcatgtaaactctggacagaagcattctcagaaactgctttgggatgtttcaattgaagtcccagtgttgaatattccctttcatagagcaggtttgaaacactctttttgtactatctggaagtggacatttggagcgctttcaggtctacggtgaaaaaggagatatcttccaataaaaactagatagaagcaatgtcagaacttttttcatgatgtatctactcagcaaacagagttgaacctttcttttgagagagcagttttgaaacactctttttgtggaatatgcaagtgggtattaggccagcttggaggatttcgttggaaacgggaatacgtataaaaagcagacagcagcattgtcagaaactactttgtgatgtttgcattcaagtcacagaattgaacactccctttcacagagcaggtttgaaacactctttttgtagtgtctgtaagtgaacatttggattgctttcaggcctaaggtgaaaaaggaaatatcttcccataaaaactagacagaagcattctcagaaacttgtttgtgatgtgtgccctctactgacagagttgaacctttctttgcaaagagcagttttgaaacactctttttgtagaatctgcaagaggatatttggatagctttgaggatttcttgggaaacgggaatgtcttcagataaactctagacagaagcattctcagaaacttctttgggatgtttcaattgaagtcacagtgttgaacattccctttcacagagcaggtttgaaacactctttttgtagtgtctataagtgaacatttggcgtgctttcaggcctaacgtgaaaaaggaaatatcttcccataaaaactagacagaagcattctcagaaacttgttcgtgatgtgtgccctctactgacagagttgaacctttctttgcaaagagcagctttgaaacactctttctgtagaatctgcaagaggatatttggatagcttggaggatttcgttggaaacgggtatgtcttcagataaactctagacagaagcattctcagaaacttctttgggatgttgcattcaagtcacagagtagaacattcccattcatagagcagatttgaaacactctttttgtagtatctggaagtggacatttggagcgctttcaggcctatgttgaaaaaggaaatatcttcccataaaaactagacggaagcattctcagaaacttatttgtgatgtgtttgctcaactaacaggattgaaccatcgttttgaaggagcagttttgaaacactgttttcgtggaatctgcaagtggatatttggctagctttgaggatttcgttggaaacgggattacatataaaaaggagacagcagcattctcagaaacttctttgtgatgtctgcattcaattcacagagttgagcattccctttcatagagcaggttggaaacactctttttgtagtatctggatgaggacatttggagcgctttcaggcgtatggtgaaaaaggaaatatcttcccgtaaaaactagacagaagcattctcagaagtttatttgtgatgtgtgccctcaactaacagagttgaacctttcttttgatagagcagttttgaaacactctttttgtaaaatctgcaagaggatatttggatagctttgaggatttcgttgcaaacgggaatggcttcatataaactctagacagaagcattctcagaaacttcgttgggatgtttcgattgaagtcccagtgttgaacattcccttttatagagcaggttggaaacactctttctgcattccctggaagtggacatttggagcgctttcaggacgacggtgaaaatggaaatatcttccaagaaaatctagatagaagcaatgtcagaaacttttatgtgatggatctactcagctaacagagttgaacctttcttttgagagagcagttttgcaacactctttttgtggaatatgcaagtggatattagggcagctttgaggatttcgttggaaacgggaatacatgtaaaaagcagacagcagcattctcagaaacttctttgtgatgtttgcattgaagtcacagagttgaacattccctttgagagagcaggtttgaaacacgccttttgtcatatctggaagtgtccattcggagcgcattcaggcttgtgttgaaaaaggaaatatcctcccataaaaactagacagaagcattctcagaaacttatctgtgatgtatgtactcaactaacagaactaaaccatcgttttgaaggagcagttttgaaacactccttttgcggaatctgcaagtggatatttggctagctgggaggatttcgttggaaacgggattacatacaaaaagcagacagcagcattctcagaaacttctttgtgatgtttgcattcaagtcacagagttgaacattccctttcatagagcaggtttgaaacactctttttgtagtatctggatgtggacatttggatcgctttcaggcctatggtgaaaaaggaaatatcttcccatgaaaactagacagaagcattctcagaaacttatttgcgatgtgtgccctcaactgacagtgttgaacctttgttttgatagagcagttctgaaacacactttttgtaaaatctgcaagaggatatttggatagctttgaggatttcgttggaaacgggaatgtcttcatgtaaactctggacagaagcattctcagaaactgctttgggatgtttcaattgaagtcccagtgttgaacattcccattcatagagcaggtttgaaacactctttttgtactatctggaagtggacatttggagcgctttcaggtctacggtgaaaaaggagatatcttccaataaaaactagatagaagcaatgtcagaacatttttcatgatgtatctactcagcaaacagagttgaacctttcttttgagagagcagttttgaaacactctttttgtggaatatgaaagtgggtattaggccagcttggaggatttcgttggaaacgggaatacgtataaaaagcagacagcagcattgtcagaaactactttgtgatgtttgcattcaagtcacagaactgaacactccctttcacagagcaggtttgaaacactctttttgtagtgtctgtaagtgaacatttggattgctttcaggcctaaggtgaaaaaggaaatatcttcccataaaaactagacagaagcattctcagaaacttgtttgtgatgtgtgccctctactgacagagttgaacctttctttgcaaagagcagttttgaaacactctttttgtagaatctgcaagaggatatttggatagctttgaggatttcttgggaaacgggaatgtcttcagataaactctagacagaagcattctcagaaacttctttgagatgtttcaattgaagtcacagtgttgaacattccctttcacagagcaggtttgaaacactctttttgtagtgtctataattgaacatttggcgtgctttcaggcctaaggtgaaaaaggaaatatcttcccataaaaactagacagaagcattctcagaaacttgttcgtgatgtgtgccctctactgacagagttgaacctttctttgcaaagagcagctttgaaacactctttttgtagaatctgcaagaggatatgtggatagctttgaggatttcgttggaaacgggtatgtcttcagataaactctagacagaagcattctcagaaacttctttgggatgtttcaattgaagtcacagtgttgaacattccctttcacagagcaggtttgaaacactctttttgtagtgtctataagtgaacatttggcgtgctttcaggcctaacgtgaaaaaggaaatatcttcccataaaaactagacagaagcattctcagaaacttgttcgtgatgtgtgccctctactgacagagttgaacctttctttgcaaagagcagctttgaaacacactttttgtagaacctgcaagaggatatttggatagctttgaggatttcgttggaaacgggtatgtcttcagataaactctagacagaagcattctcagaaacttctttgggatgttgcattcaagtcacagagtagaacattcccattcatagagcagatttgaaacactctttttgtagtatctggaagtggacatttggagcgctttcaggcctatgttgaaaaaggaaatatcttcccataaaaactagacggaagcattctcagaaacttacttgtgatgtgtttgctcaactaacagaattgaaccatcgttttgaaggagcagttttgaaacactgttttcgtggaatctgcaagtggatatttggctagctttgaggatttcgttggaaacgggattacatatacaaaggagacagcagcattctcagaaacttctttgtgatgtctgcattcaagtcacagagttgagcattccctttcatagagcaggttggaaacactctttttgtagtatctggatgaggacatttggagcgctttcaggcctatggtgaaaaaggaaatatcttcccgtaaaaactagacagaagcattctcagaaatttatttgtgatgtgtgccctcaactaacagagttgaacctttcttttgatagagcagttttgaaacactctttttgtaaaatctgcaagaggatatttggatagcattgaggatttcgttgcaaacgggaatggcttcatataaactctagacagaaagcattctcagaaacttcgtcgggatgtttcgattgaagtcccagtgttgaacattcccttttatagagcaggttggaaacactctttctgcattccctggaagtggacaattggagcgctttcaggacgacggtgaaaatggaaatatcttccaataaaatctggatagagcaaccgtcagaaacttttctgtgatggatctactcagctaacagagttgaacctttcttttgagagagcagttttgcaacactctttttgtggaatatgcaagtggatattagggcagctttgaggatttcgttggaaacgggaatacatgtaaaaagcagacagcagcattctcagaaacttctttgtgatgtttgcattgaagtcacagagttgaacattccctttgagagagcaggtttgaaacacgccttttgtcatatctggaagtgtccattcggagcgcattcaggcttgtgttgaaaaaggaaatatcctcccataaaaactagacagaagcattctcagaaacttatctgtgatgtatgtactcaactaacagaactaaaccatcgttttgaaggagcagttttgaaacactctttttgcggaatctgcaagtggatatttggctagctgggaggatttcgttggaaacgggattacatacaaaaagcagacagcagcattctcagaaacttctttgtgatgtttgcattcaagtcacagagttgaacattccctttcatagagcaggtttgaaacactctttttgtagtatctggatgtggacatttggatcgctttcaggcctatggtgaaaaaggaaatatcttcccatgaaaactagacagaagcattctcagaaacttatttgtgatgtgtgccctcaactgacagtgttgaacctttgttttgatagagcagttctgaaacacactttttgtaaaatctgcaagaggatatttggatagctttgaggatttcgttggaaacgggaatgtcttcatgtaaacttctagacagaagcattctcagaaactgctttgggatgtttcaattgaagtcccagtgttgaacattccctttcatagagcaggtttgaaacactctttttgtactatctggaagtggacatttggagcgctttcaggtctaaggtgaaaaaggagatatcttccaataaaaactagatagaagcaatgtcagaacttttttcatgatgtatctactcagcaaacagagttgaacctttcttttgagagagcagttttgaaacactctttttgtggaatatgcaagtgggtattaggccagcttggaggatttcgttggaaacgggaatacgtataaaaagcagacagcagcattgtcagaaactactttgtgatgtttacattcaagtcacagaattgaacactccctttcacagaacaggtttgaaacactctttttgtagtgtctgtaagtgaacatttggattgctttcaggcctaaggtgaaaaaggaaatatcttcccataaaaactagacagaagcattctcagaaacttgtttgtgatgtgtgccctctactgacagagttgaacctttctttgcaaagaccagttttgaaacactctttttgtagaatctgcaagaggatatttggatagctttgaggatttcttgggaaacgggaatgtcttcagataaactctagacagaagcattctcagaaacttctttgggatgtttcaattgaagtcacagtgttgaacattccctttcacagagcaggtttgaaacactctttttgtagtgtctataagtgaacatttggcgtgctttcaggcctaacgtgaaaaaggaaatatcttcccataaaaactagacagaagcattctcagaaacttgttcgtgatgtgtgccctctactgacagagttgaacctttctttgcaaagagcagctttgaaacactctttctgtagaatctgcaagaggatatttggatagcttggaggatttcgttgtaaacgggtatgtcttcagataaactctagacagaagcattctcagaaacttctttgggatgttgcattcaagtcacagagtagaacattcccattcatagagcagatttgaaacactctttttgtagtatctggaagtggacatttggagcgctttcaggcctatgttgaaaaaggaaatatcttcccataaaaactagacggaagcattctcagaaacttatttgtgatgtgtttgctcaactaacaggattgaaccatcgttttgaaggagcagttttgaaacactgttttcgtggaatctgcaagtggatatttggctagctttgaggatttcgttggaaacgggattacatataaaaaggagacagcagcattctcagaaacttctttgtgatgtctgcattcaaatcacagagttgagcattccctttcatagagcaggttggaaacactctttttgtagtatctggatgaggacatttggagcgctttcaggcgtatggtgaaaaagaaaatatcttcccgtaaaaactagacagaagcattctcagaaatttatttgtgatgtgtgccctcaactaacagagttgaacctttcttttgatagagcagttttgaaacactctttttgtaaaatctgcaagaggatatttggatagctttgaggatttcattgcaaacgggaatggcttcatataaactctagacagaagcattctcagaaacttcgttgggatgtttcgattgaagtcccagtgttgaacattcccttttatagagcaggttggaaacactctttctgcattccctggaagtggacatttggagcgctttcaggacgacggtgaaaatggaaatatcttccaagaaaatctagatagaagcaacgtcagaaacttttatgtgatggatctactcagctaacagagttgaacctttcttttgagagagcagttttgcaacactctttttgtggaatatgcaagtggatattagggcagctttgaggatttcgttggaaacgggaatacatgtaaaaagcagacagcagcattctcagaaacttctttgtgatgtttgcattgaagtcacagagttgaacattccctttgagagagcaggtttgaaacacgccttttgtcatatctggaagtgtccattcggagcgcattcaggcttgtgttgaaaaaggaaatatcctcccataaaaactagacagaagcattctcagaaacttatctgtgatgtatgtactcaactaacagaactaaaccatcgttttgaaggagcagttttgaaacactctttttgcggaatccgcaagtggatatttggctagctgggaggatttcgttggaaacgggattacatacaaaaagcagacagccagcattctcagaaaacttctttgtgatgtttgcattcaagtcacagagttgaacattccctttcatagagcaggtttgaaacactctttttgtagtatctggatgtggacatttggatcgctttcaggcctatggtgaaaaaggaaatatcttcccatgaaaactagacagaagcattctcagaaacttatttgtgatgtgtgccctcaactgacagtgttgaacctttgttttgatagagcagttctgaaacacactttttgtaaaatctgcaagaggatatttggatagctttgaggatttcgttggaaacgggaatgtcttcatgtaaactctagacagaagcattctcagaaactgctttgggatgtttcaattgaagtcccagtgttgaacattcccattcatagagcaggtttgaaacactctttttgtactatctggaagtggacatttggagcgctttcaggtctacggtgaaaaaggagatatcttccaataaaaactagatagaagcaatgtcagaacttttttcatgatgtatctactcagcaaacagagttgaacctttcttttgagagagcagttttgaaacactctttttgtggaatatgcaagtgggtattaggccagcttggaggatttcgttggaaacgggaatacgtataaaaagcagacagcagcattgtcagaaactactttgtgatgtttgcattcaagtcacagaattgaacactccctttcacagagcaggtttgaaacactctttttgtagtgtctgtaagtgaacatttggattgctttcaggcctatgtgaaaaaggaaatatcttcccataaaaactagacagaaagcattctcagaaacttgtttgtgatgtgtgccctctactgacagagttgaacctttctttgcaaagagaagttttgaaacactctttttgtagaatctgcaagaggatatttggatagctttgaggatttcttgggaaacgggaatgtcttcagataaactctagacagaagcattctcagaaacttctttgggatgtttcaattgaagtcacagtgttgaacattccctttcacagagcaggtttgaaacactctttttgtagtgtctataagtgaacatttggcgtgctttcagttgtaacgtgaaaaaggaaatatcttcccataaaaactagacagaagcattctcagaaacttgttcgtgatgtgtgccctctactgacagagttgaacctttctttgcaaagagcagctttgaaacactctttttgtagaatctgcaagaggatatttggatagctttgaggatttcgttggaaacgggtatgtcttcagataaactctagacagaagcattctcagaaacttctttgggatgttgcattcaagtcacagagtagaacattcccattcatagagcagatttgaaacactctttttgtagtatctggaagtggacatttggagcgctttcaggcctatgttgaaaaaggaaatatcttcccataaaaactagacggaagcattctcagaaacttacttgtgatgtgtttgctcaactaacagaattgaaccatcgttttgaaggagcagttttgaaacactgttttcgtggaatctgcaagtggatatttggctagctttgaggatttcgttggaaacgggattacatataaaaaggagacagcagcattctcagaaacttctttgtgatgtctgcattcaagtcacagagttgagcattccctttcatagagcaggttggaaacactctttttgtagtatctggatgaggacatttggagcgctttcaggcgtatggtgaaaaaggaaatatcttcccgtaaaaactagacagaagcattctcagaaatttatttgtgatgtgtgccctcaactaacagagttgaacttttcttttgatagagcagttttgaaacactctttttgtaaaatctgcaagaggatatttggatagctttgaggatttcgttgcaaacgggaatggcttcatataaactctagacagaagcattctcagaaacttcgttgggatgtttcgattgaagtcccagtgttgaacattcccttttatagagcaggttggaaacactctttctgcattccctggaagtggacatttggagcgctttcaggacgatggtgaaaatggaaatatcttccaagaaaatctagatagaagcaatgtcagaaacttttatgtgatggatctactcagctaacagagttgaacctttcttttgagagagcagttttgcaacactctttttgtggaatatgcaagtggatattagggcagctttgaggatttcgttggaaacgggaatacatgtaaaaagcagacagcagcattctcagaaacttctttgtgatgtttgcattgaagtcacagagttgaacattccctttgagagagcaggtttgaaacacgccttttgtcatatctggaagtgtccattcggagcgcattcaggcttgtgttgaaaaaggaaatatcctcccataaaaactagacagaagcattctcagaaacttatctgtgatgtatgtactcaactaacagaactaaaccatcgttttgaaggagcagttttgaaacactctttttgcggaatctgcaagtggatatttggctagctgggaggatttcgttggaaacgggattacatacaaaaagcagacagcagcattctcagaaacttctttgtgatgtttgcattcaagtcacagagttgaacattccctttcatagagcaggtttgaaacactctttttgtagtatctggatgtggacatttggatcgctttcaggcctatggtgaaaaaggaaatatcttcccatgaaaactagacagaagcattctcagaaacttatttgtgatgtgtgccctcaactgacagtgttgaacctttgttttgatagagcagttctgaaacacactttttgtaaaatctgcaagaggatatttggatagctttgaggatttcgttggaaacgggaatgtcttcatgtaaactctagacagaagcattctcagaaactgctttgggatgtttcaattgaagtcccagtgttgaacattcccattcatagagcaggtttgaaacactctttttgtactatctggaagtggacatttggagcgctttcaggtctacggtgaaaaaggagatatcttccaataaaaactagatagaagcaatgtcagaactttcttcatgatgtatctactcagcaaacagagttgaacctttcttttgagggagcagttttgaaacactatttttgtggaatatgcaagtgggtattaggccagcttggaggatttcgttggaaacgggaatacgtataaaaagcagacagccagcattgtcagaaactactttgtgatgtttgcattcaagtcacagaattgaacactccctttcacagagcaggtttgaaacactctttttgtagtgtctgtaagtgaacatttggattgctttcaggcctaaggtgaaaaaggaaatatcttcccataaaaactagacagagcattctcagaaacttgtttgtgatgtgtgccctctactgacagagttgaacctttctttgcaaagagcagttttgaaacactctttttgtagaatctgcaagaggatatttggatagctttgaggatttcttgggaaacgggaatgtcttcagataaactctagacagaagcattctcagaaacttctttgggatgtttcaattgaagtcacagtgttgaacattccctttcacagagcaggtttgaaacactctttttgtagtgtctataagtgaacatttggcgtgctttcaggcctaacgtgaaaaaggaaatattcttcccataaaaactagacagaagcattctcagaaacttgttcttgatgtgtcccctctactgacagagttgaacctttctttgcaaagagcagctttgaaacactctttttgtagaatctgcaagaggatatttggatagcttggaggatttcgttggaaacgggtatgtcttcagataaactctagacagaagcattctcagaaacttctttgggatgttgcattcaagtcacagagtagaacattcccattcatagagcagatttgaaacactctttttgtagtatctggaagtggacatttggagcgcttcaggcctatgttgaaaaaggaaatatcttcccataaaaactagacggaagcattctcagaaacttacttgtgtttgctcaactaacagaattgaaccatcgttttgaaggagcagttttgaaacactgttttcgtggaatctgcaagtggatatttggctagctttgaggatttcgttggaaacgggattacatataaaaaggagacagcagcattctcagaaacttctttgtgatgtctgcattcaagtcacagagttgagcattccctttcatagagcaggttggaaacactctttttgtagtatctggatgaggacatttggagcgctttcaggcgtatggtgaaaaaggaaatatcttcccgtaaaaactagacagaagcattctcagaaatttatttgtgatgtgtgccctcaactaacagagttgaacctttcttttgatagagcagttttgaaacactctttttgtaaaatctgcaagaggatatttggatagctttgaggatttcgttgcaaacgggaatggcttcatataaactctagacagaagcattctcagaaacttcgttgggatgtttcgattgaagtcccagtgttgaacattcccttttatagagcaggttggaaacactctttctgcattccctggaagtggacaattggagcgctttcaggacgacggtgaaaatggaaatatcttccaataaaatctggatagaagcaatgtcagaaacttttctgtgatggatctactcagctaacagagttgaacctttcttttgagagagcagttttgcaacactctttttgtggaatatgcaagtggatattagggcagctttgaggatttcgttggaaacgggaatacatgtaaaaagcagacagcagcattctcagaaacttctttgtgatgtttgcattgaagtcacagagttgaacattccctttgagagagcaggtttgaaacacgccttttgtcatatctggaagtgtccattcggagcgcattcaggcttgtgttgaaaaaggaaatatcctcccagaaaaactagacagaagcattctcagaaacttatctgtgatgtatgtactcaactaacagaactaaaccatcgttttgaaggagcagttttgaaacactctttttgcggaatctgcaagtggatatttggctagctgggaggatttcgttggaaacgggattacatacaaaaagcagacagcagcattctcagaaacttctttgtgatgtttgcattcaagtcacagagttgaacattccctttcatagagcaggttggaaacactctttttgtagtatctggatgtggacatttggatggctttcaggcctatggtgaaaaaggaaatatcttcccatgaaaactagacagaagcattctcagaaacttatttgtgatgtgtgccctcaactgacagtgttgaacctttgttttgatagagcagttctgaaacacactttttgtaaaatctgcaagaggatatttggatagctttgaggatttcgttggaaacgggaatgtcttcatgtaaactctagacagaagcattctcagaaactgctttgggatgtttcaattgaagtcccagtgttgaacattccctttcatagagcaggtttgaaacactctttttgtactatctggaagtggacatttggagcgctttcaggtctacggtgaaaaaggagatatcttccaataaaaactagatagaagcaatgtcagaacttttttcatgatgtatctactcagcaaacagagttgaacctttcttttgagagagcagttttgaaacactctttttggggaatatgcaagtgggtattaggccagcttggaggatttcgttggaaacgggaatacgtaaaaaaagcagacagcagcattgtcagaaactgctttgtgatgtttgcattcaagtcacagaattgaacactccctttcacagagcaggtttgaaacactctttttgtagtgtctgtaagtgaacatttggattgctttcaggcctaaggtgaaaaaggaaatatcttcccataaaaactagacagaagcattctcagaaacttgtttgtgatgtgtgccctctactgacagagttgaacctttctttgcaaagagcagttttgaaacactctttttgtagaatctgcaagaggatatttggatagctttgaggatttcttgggaaacgggaatgtcttcagataaactctagacagaagcattctcagaaacttctttgagatgtttcaattgaagtcacagtgttgaacattccctttcacagagcaggtttgaaacactctttttgtagtgtctataattgaacatttggcgtgctttcaggcctaacgtgaaaaaggaaatatcttcccataaaaactagacagaagcattctcagaaacttgttcgtgatgtgtgccctctactgacagagttgaacctttctttgcaaagagcagctttgaaacactctttttgtagaatctgcaagaggatatgtggatagctttgaggatttcgttggaaacgggtatgtcttcagataaactctagacagaagcattctcagaaacttctttgggatgtttcaattgaagtcacagtgttgaacattccctttcacagagcaggtttgaaacactctttttgtagtgtctataagtgaacatttggcgtgctttcaggcctaacgtgaaaaaggaaatatcttcccataaaaactagacagaagcattctcagaaacttgttcatgatgtgtgccctctactgacagagttgaacctttctttgcaaagagcagctttgaaacactctttttgtagaatctgcaagaggatatttggatagcttggaggatttcgttggaaacgggtatgtcttcagataaactctagacagaagcattctcagaaacttctttgggatgttgcattcaagtcacagagtagaacattcccattcatagagcagatttgaaacactctttttgtagtatctggaagtggacatttggagcgctttcaggcctatgttgaaaaaggaaatatcttcccataaaaactagacggaagcattctcagaaacttacttgtgatgtgtttgctcaactaacagaattgaaccatcgttttaaaggagcagttttgaaacactgttttcgtggaatctgcaagtggatatttggctagctttgaggatttcgttggaaacgggattacatataaaaaggagacagcagcattctcagaaacttctttgtgatgtctgcattcaattcacagagttgagcattccctttcatagagcaggttggaaacactctttttgtagtatctggatgaggacatttggagcgctttcaggcgtatggtgaaaaaggaaatatcttcccgtaaaaactagacagaagcattctcagaaatttatttgtgatgtgtgccctcaactaacagagttgaacctttcttttgatagagcagttttgaaacactctttttgtaaaatctgcaagaggatatttggatagctttgaggatttcattgcaaacgggaatggcttcatataaactctagacagaagcattctcagaaacttcgttgggatgtttcgattgaagtcccagtgttgaacattcccttttatagagcaggttggaaacagtctttctgcattccctggaagtggacatttggagcgctttcaggacgacggtgaaaatggaaatatcttccaataaaatctggatagaagcaatgtcagaaacttttctgtgatggatctactcagctaacagagttgaacctttcttttgagagagcagttttgcaacactctttttgtggaatatgcaagtggatattagggcagctttgaggatttcgttggaaacgggaatacatgtaaaaagcagacagcagcattctcagaaacttctttgtgatgtttgcattgaagtcacagagttgaacattccctttgagagagcaggtttgaaacacgccttttgtcatatctggaagtgtccattcggagcgcattcaggcttgtgttgaaaaaggaaatatcctcccataaaaactagacagaagcattctcagaaacttatttgtgatgtatgtactcaactaacagaactaaaccatcgttttgaaggagcagttttgaaacactctttttgcggaatctgcaagtggatatttggctagcttgggggatttcgttggaaacgggattacatacaaaaagcagacagcagcattctcagaaacttctttgtgatgtttacattcaagtcacagagttgaacattccctttcatagagcaggtttgaaaccctctttttgtagtatctggatgtggacatttggatcgctttcaggcctatggtgaaaaaggaaatatcttcccatgaaaactagacagaagcattctcagaaacttatttgtgatgtgtgccctcaactgacagtgttgaacctttgttttgatagagcagttctgaaacacactttttgtaaaatctgcaagaggatatttggatagctttgaggatttcgttggaaacgggaatgtcttcatgtaaactctagacagaagcattctcagaaactgctttgggatgtttcaattgaagtcccagtgttgaacattccctttcatagagcaggtttgaaacactctttttgtactatctggaagtggacatttggagcgctttcaggtctacggtgaaaaaggagatatcttccaataaaaactagatagaagcaatgtcagaacttttttcatgatgtatctactcagcaaacagagttgaacctttcttttgagagagcagttttgaaacactctttttgtggaatatgcaagtgggtattaggccagcttggaggatttcgttggaaacgggaatacgtataaaaagcagacagcagcattgtcagaaactactttgtgatgtttgcattcaagtcacagaattgaacactccctttcacagagcaggtttgaaacactctttttgtagtgtctgtaagtgtacatttggattgctttcaggcctaaggtgaaaaaggaaatatcttcccataaaaactagacagaagcattctcagaaacttgtttgtgatgtgtgccctctactgacagagttgaacctttctttgcaaagagcagttttgaaacactctttttgtagaatctgcaagaggatatttggatagctttgaggatttcttgggaaacgggaatgtcttcagataaactctagacagaagcattctcagaaacttctttgggatgtttcaattgaagtcacagtgttgaacattccctttcacagagcaggtttgaaacactctttttgtagtgtctataagtgaacatttggcgtgctttcaggcctaacgtgaaaaaggaaatatcttcccataaaaactagacagaagcattctcagaaacttgtttgtgatgtgtgccctctactgacagagttgaacctttctttgcaaagagcagttttgaaacactctttttgtagaatgtgcaagaggatatttggatagctttgaggatttcttgggaaacgggaatgtcttcagataaactctagacagaagcattctcagaaacttctttgggatgttgcattcaagtcacagagtagaacattcccattcatagagcagatttgaaacactctttttgtagtatctggaagtggacatttggagcgctttcaggcctatgttgaaaaaggaaatatcttcccataaaaactagacggaagcattctcagaaacttatttgtgatgtgtttgctcaactaacaggattgaaccatcgttttgaaggagcagttttgaaacactgttttcgtggaatctgcaagtggatatttggctagctttgaggatttcgttggaaacgggattacatataaaaaggagacagcagcattctcagaaacttctttgtgatgtctgcattcaattcacagagttgagcattccctttcgtagagcaggttggaaacactctttttgtagtatctggatgaggacatttggagcgctttcaggcgtaatggtgaaaagggaaatatcttcccgtaaaaactagacagaagcattctcagaagtttatttgtgatgtgtgccctcaactaacagagttgaacttttcttttgatagagcagttttgaaacactctttttgtaaaatctgcaagaggatatttggatagctttgaggatttcgttgcaaacgggaatggcttcatataaactctagacagaagcattctcagaaacttcgttgggatgtttcgattgaagtcccagtgttgaacattcccttttatagagcaggttggaaacactctttctgcattccctggaagtggacatttggagcgctttcaggacgacggtgaaaatggaaatatcttccaagaaaatctagatagaagcaacgtcagaaacttttatgtgatggatctactcagctaacagagttgaacctttcttttgagagagcagttttgcaacactctttttgtggaatatgcaagtggatattagggcagctttgaggatttcgttggaaacgggaatacatgtaaaaagcagacagcagcattctcagaaacttctttgtgatgtttgcattgaagtcacagagttgaacattccctttgagagagcaggtttgaaacacgccttttgtcatatctggaagtgtccattcggagcgcattcaggcttgtgttgaaaaaggaaatatcctcccataaaaactatacagaagcattctcagaaacttatttgtgatgtatgtactcaactaacagaactaaaccatcgttttgaaggagcagttttgaaacactctttttgcggaatctgcaagtggatatttggctagcttgggggatttcgttggaaacgggattacatacaaaaagcagacagcagcattctcagaaacttctttgtgatgtttacattcaagtcacagagttgaacattccctttcatagagcaggtttgaaaccctctttttgtagtatctggatgtggacatttggatcgctttcaggcctatggtgaaaaaggaaatatcttcccatgaaaactagacagaagcattctcagcaaacttatttgtgatgtgtgcactcaactgacagtgttgaacctttgttttgatagagcagttctgaaacacactttttgtaaaatctgcaagaggatatttggatagctttgaggatttcgttggaaacgggaatgtcttcatgtaaactctagacagaagcattctcagaaactgctttgggatgtttcaattgaagtcccagtgttgaacattcccattcatagagcaggtttgaaacactctttttctactatctggaagtggacatttggagcgctttcaggtctacggtgaaaaaggagatatcttccaataaaaactagatagaagcaatgtcagaacttttttcatgatgtatctactcagcaaacagagttgaacctttcttttgagagagcagttttgaaacactctttttgtggaatatgcaagtgggtattaggccagcttggaggatttcgttggaaacgggaatacgtataaaaagcagacagcagcattgtcagaaactactttgtgatgtttgcattcaagtcacagaattgaacactccctttcacagagcaggtttgaaacactctttttgtagtgtctgtaagtgaacatttggattgctttcaggcctaaggtgaaaaaggaaatatcttcccataaaaactagacagaagcattctcagaaacttgtttgtgatgtgtgccctctactgacagagttgaacctttctttgcaaagagcagttttgaaacactctttttgtagaatctgcaagaggatatttggatagctttgaggatttcttgggaaacgggaatgtcttcagataaactctagacagaagcattctcagaaacttctttgggatgtttcaattgaagtcacagtgttgaacattccctttcacagagcaggtttgaaacactctttttgtagtgtctataagtgaacatttggcgtgctttcaggcctaacgtgaaaaaggaaatatcttcccataaaaactagacagaagcattctcagaaacttgttcgtgatgtgtgccctctactgacagagttgaacctttctttgcaaagagcagctttgaaacactctttttgtagaatctgcaagaggatatgtggatagctttgagggtttcgttggaaacgggtatgtcttcagataaactctagacagaagcattctcagaaacttctttgggatgttgcattcaagtcacagagtagaacattcccattcatagagcagatttgaaacactctttgtgtagtatctggaagtggacatttggagcgctttcaggcctatgttgaaaaaggaaatatcttcccataaaaacaagacggaagcattctcagaaacttatttctgatgtgtttgctcaactaacagaattgaaccatcgttttgaaggagcagttttgaaacactgttttcgtggaatctgcaagtggatatttggctagctttgaggatttcgttggaaacgggattacctataaaaaggagacagcagcattctcagaaacttctttgtgatgtctgcattcaagtcacagagttgagcattccctttcatagagcaggtttgaaacactctttttgtagtatctggatgaggacatttggagcgctttcaggcgtatggtgaaaaaggaaatatcttcccgtaaaaactagacagaagcattctcagaaatttatttgtgatgtgtgccctcaactaacagagttgaacctttcttttgatagagcagttttgaaacactctttttgtaaaatctgcaagaggatatttggagagctttgaggatttcgttgcaaacgggaatggcttcatataaactctagacagaagcattctcagaaacttcgttgggatgtttcgattgaagtcccagtgttgaacattcccttttatagagcaggttggaaacactctttctgcattccctggaagtggacatttggagcgctttcaggacgacggtgaaaatggaaatatcttccaataaaatctagatagaagcaatgtcagaaacttttatgtgatggatctactcagctaacagagttgaacctttcttttgagagagcagttttgcaacactctttttgtggaatatgcaagtggatattagggcagctttgaggatttcgttggaaacgggaatacatgtaaaaagcagacagcagcattctcagaaacttctttgtgatgtttgcattgaagtcacagagttgaacattccctttgagagagcaggtttgaaacacgccttttgtcatatctggaagtgtccattcggagcgcattcaggcttgtgttgaaaaaggaaatatcctcccataaaaactagacagaagcattctcagaaacttatctgtgatgtatgtactcaactaacagaactaaaccatcgttttgaaggagcagttttgaaacactctttttgcggaatctgcaagtggatatttggctagctgggaggatttcgttggaaacgggattacatacaaaaagcagacagcagcattctcagaaacttctttgtgatgtttgcattcaagtcacagagttgaacattccctttcatagagcaggtttgaaacactctttttgtagtatctggatgtggacatttggatcgctttcaggcctatggtgaaaaaggaaatatcttcccatgaaaactagacagaagcattctcagaaacttatttgtgatgtgtgccctcaactgacagtgttgaacctttgttttgatagagcagttctgaaacacactttttgtaaaatctgcaagaggatatttggatagctttgaggatttcgttggaaacgggaatgtcttcatgtaaactctacacagaagcattctcagaaactgctttgggatgtttcaattgaagtcccagtgttgaacattcccattcatagagcaggtttgaaacactctttttgtactatctggaagtggacatttggagcgctttcaggtctacggtgaaaaaggagatatcttccaataaaaactagatagaagcaatgtcagaacttttttcatgatgtatctactcagcaaacagagttgaacctttcttttgagagagcagttttgaatcactctttttgtggaatatgcaagtgggtattaggccagcttggaggatttcgttgaaaacgggaatacatgtaaaaagcagacagcagcattctcagaaacttctttgtgatgtttgcattgaagtcacagagttgaacattccctttgagagagcaggtttgaaacacgccttttgtcatatctggaagtgtccattcggagcgcattcaggcttgtgttgaaaaaggaaatatcctcccagaaaaactagacagaagcattctcagaaacttatctgtgatgtatgtactcaactaacagaactaaaccatcgttttgaaggagcagttttgaaacactctttttgcggaatctgcaagtggatatttggctagctgggaggatttcgttggaaacgggattacatacaaaaagcagacagcagcattctcagaaacttctttgtgatgtttgcattcaagtcacagagttgaacattccctttcatagagcaggtttgaaacactctttttgtagtatctggatgtggacatttggatcgctttcaggcctatggtgaaaaaggaaatatcttcccatgaaaactagacagaagcattctcagaaacttatttgtgatgtgtgccctcaactgacagtgttgaacctttgttttgatagagcagttctgaaacacactttttgtaaaatctgcaagaggatatttggatagctttgaggatttcgttggaaacgggaatgtcttcatgtaaactctagacagaagcattctcagaaactgctttgggatgtttcaattgaagtcccagtgttgaacattcccattcatagagcaggtttgaaacactctttttgtactatctggaagtggacatttggagcgctttcaggtctacggtgaaaaaggagatatcttccaataaaaactagatagaagcaatgtcagaacttttttcatgatgtatctactcagcaaacagagttgaacctttcttttgagagagcagttttgaaacactctttttgtggaatatgcaagtgggtattaggccagcttggaggatttcgttggaaacgggaatacgtataaaaagcagacagcagcattgtcagaaactactttgtgatgtttgcattcaagtcacagaattgaacactccctttcacagagcaggtttgaaacactctttttgtagtgtctgtaagtgaacatatggattgctttcaggcctaaggtgaaaaaggaaatatcttcccataaaaactagacagaagcattctcagaaacttgtttgtgatgtgtgccctctactgacagagttgaacctttctttgcaaagagcagttttgaaacactctttttgtagaatctgcaagaggatatttggatagctttgaggatttcttgggaaacgggaatgtcttcagataaactctagacagaagcattctcagaaacttctttgggatgttgcattcaagtcacagagtagaacattcccattcatagagcagatttgaaacactctttttgtagtatctggaagtggacatttggagcgctttcaggcctatgttgaaaaaggaaatatcttcccataaaaactagacggaatcattctcagaaacttacttgtgatgtgtttgctcaactaacagaattgaaccatcgttttgaaggagcagttttgaaacactgttttcgtggaatctgcaagaggatatttggatagctttgaggatttcgttggaaacgggattacatataaaaaggagacagcagcattctcagaaacttctttgtgatgtctgcattcaagtcacagagttgagcattccctttcatagagcaggttggaaacactctttttgtagtatctggatgaggacatttggagcgctttcaggcctatggtgaaaaaggaaatatcttcccgtaaaaactagacagaagcattctcagaaatttatttgtgatgtgtgccctcaactaacagagttgaacctttcttttgatagagcagttttgaaacactctttttgtaaaatctgcaagaggatatttggatagctttgaggatttcgttgcaaacgggaatggcttcatataaactctagacagaagcattctcagaaacttcgttgggatgtttcgattgaagtcccagtgttgaacattcccttttatagagcaggttggaaacactctttctgcattccctggaagtggacatttggagcgctttcaggacgacggtgaaaatggaaatatcttccaagaaaatctagatagaagcaacgtcagaaacttttctgtgatggatctactcagctaacagagttgaacctttcttttgagagagcagttttgcaacactctttttgtggaatatgcaagtggatattagggcagcttttaggatttcgttggaaacgggaatacatgtaaaaagcagacagcagcattctcagaaacttctttgtgatgtttgcattgaagtcacagagttgaacattccctttgagagagcaggtttgaaacacgccttttgtcatatctggaagtgtccattcggagcgcattcaggcttgtgttgaaaaaggaaatatcctcccataaaaactagacagaagcattctcagaaacttatctgtgatgtatgtactcaactaacagaactaaaccatcgttttgaaggagcagttttgaaacactctttttgcggaatctgcaagtggatatttggctagctgggaggatttcgttggaaacgggattacatacaaaaagcagacagcagcattctcagaaacttctttgtgatgtttgcattcaagtcacagagttgaacattccctttcatagagcaggtttgaaacactctttttgtagtatctggatgtggacatttggatcgctttcaggcctatggtgaaaaaggaaatatcttcccatgaaaactagacagaagcattctcagaaacttatttgtgatgtgtgccctcaactgacagtgttgaacctttgttttgatagagcagttctgaaacacactttttgtaaaatctgcaagaggatatttggatagctttgaggatttcgttggaaacgggaatgtcttcatgtaaactctacacagaagcattctcagaaactgctttgggatgtttcaattgaagtcccagtgttgaacattcccattcatagagcaggtttgaaacactctttttgtactatctggaagtggacatttggagcgctttcaggtctacggtgaaaaaggagatatcttccaataaaaactagatagaagcaatgtcagaacttttttcatgatgtatctactcagcaaacagagttgaacctttcttttgagagagcagttttgaaacactctttttgtggaatatgcaagtgggtattaggccagcttggaggatttcgttggaaacgggaatacgtataaaaagcagacagcagcattgtcagaaactactttgtgatgtttgcattcaagtcacagaattgaacactccctttcacagagcaggtttgaaacactctttttgtagtgtctgtaagtgaacatatggattgctttcaggcctaaggtgaaaaaggaaatatcttcccataaaaactagacagaagcattctcagaaacttgtttgtgatgtgtgccctctactgacagagttgaacctttctttgcaaagaccagttttgaaacactctttttgtagaatctgcaagaggatatttggatagctttgaggatttcttgggaaacgggaatgtcttcagataaactctagacagaagcattctcagaaacttctttgggatatttcaattgaagtcacagtgttgaacattccctttcacagagcaggtttgaaacactctttttgtagtgtctataagtgaacatttggcgtgctttcaggcctaacgtgaaaaaggaaatatcttcccataaaaactggacagaagcattctcagaaacttgttcatgatgtgtgccctctactgacagagttgaacctttctttgcaaagagcagctttgaaacactctttttgtagaatctgcaagaggatatttggatagcttggaggatttcgttggaaacgggtatgtcttcagataaactctagacagaagcattctcagaaacttctttgggatgttgcattcaagtcacagagtagaacattcccattcatagagcagatttgaaacactctttttgtagtatctggaagtggacatttggagcgctttcaggcctatgttgaaaaaggaaatatcttcccataaaaactagacggaagcattctcagaaacttacttgtgatgtgtttgctcaactaacagaattgaaccatcgttttgaaggagcagttttgaaacactgttttcgtggaatctgcaagtggatatttggctagctttgaggatttcgttggaaacgggattacatataaaaaggagacagcagcattctcagaaacttctttgtgatgtctgcattcaagtcacagagttgagcattccctttcatagagcaggttggaaacactctttttgtagtatctggatgaggacatttggagcgctttcaggcctatggtgaaaaaggaaatatcttcccgtaaaaactagacagaagcattctcagaaatttatttgtgatgtgtgccctcaactaacagagttgaacctttcttttgatagagcagttttgaaacactctttttgtaaaatctgcaagaggatatttggatagctttgaggatttcgttgcaaatgggaatggcttcatataaactctagacagaagcattctcagaaacttcgttgggatgtttcgattgaagtcccagtgttgaacattcccttttatagagcaggttggaaacactctttctgcattccctggaagtggacatttggagcgctttcaggacgacggtgaaaatggaaatatcttccaagaaaatctagatagaagcaatgtcagaaacttttatgtgatggatctactcagctaacagagttgaacctttcttttgagagagcagttttgcaacactctttttgtggaatatgcaagtggatattagggcagctttgaggatttcgttggaaacgggaatacatgtaaaaagcagacagcagcattctcagaaacttctttgtgatgtttgcattgaagtcacagagttgaacattccctttgagagagcaggtttgaaacacgccttttgtcatatctggaagtgtccattcggagcgcattcaggcttgtgttgaaaaaggaaatatcctcccataaaaactagacagaagcattctcagaaacttatctgtgatgtatgtactcaactaacagaactcaaccatcgttttgaaggagcagttttgaaacactctttttgcggaatctgcaagtggatatttggctagctgggaggatttcgttggaaacgggattacatacaaaaagcagacagcagcattctcagaaacttctttgtgatgtttgcattcaagtcacagagttgaacattccctttcatagagcaggtttgaaacactctttttgtagtatctggatgtggacatttggatcgctttcaggcctatggtgaaaaaggaaatatcttcccatgaaaactagacagaagcattctcagaaacttatttgtgatgtgtgccctcaactgacagtgttgaacctttgttttgatagagcagttctgaaacacactttttgtaaaatctgcaagaggatatttggatagctttgaggatttcgttggaaacgggaatgtcttcatgtaaactctagacagaagcattctcagaaactgctttgggatgtttcaattgaagtcccagtgttgaacattccctttcatagagcaggtttgaaaccctctttttgtactatctggaagtggacatttggagcgctttcaggtctacggtgaaaaaggagatatcttccaataaaaactagatagaagcaatgtcagaacttttttcatgatgtatctactcagcaaacagagttgaacctttcttttgagggagcagttttgaaacactatttttgtggaatatgcaagtgggtattaggccagcttggaggatttcgttggaaacgggaatacgtataaaaagcagacagcagcattgtcagaaactactttgtgatgtttgcattcaagtcacagaattgaacactccctttcacagagcaggtttgaaacactctttttgtagtgtctgtaagtgaacatttggattgctttcaggcctaaggtgaaaaaggaaatatcttcccataaaaactagacagaagcattctcagaaacttgtttgtgatgtgtgccctctactgacagagttgaacctttctttgcaaagagcagttttgaaacactctttttgtagaatctgcaagaggatatttggatagctttgaggatttcttgggaaacgggaatgtcttcagataaactctagacagaagcattctcagaaacttctttgggatgtttcaattgaagtcacagtgttgaacattccctttcacagagcaggtttgaaacactctttttgtagtgtctataagtgaacatttggcgtgctttcaggcgtaacgtgaaaaaggaaatatcttcccataaaaactagacagaagcattctcagaaacttgttcgtgatgtgtgccctctactgacagagttgaacctttctttgcaaagagcagctttgaaacacactttttgtagaatctgcaagaggatatttggatagctttgaggatttcgttggaaacgggtatgtcttcagatatactctagacagaagcattctcagaaacttctttgggatgttgcattcaagtcacagagtagaacattcccattcatagagcagatttgaaacactctttttgtagtatctggaagtggacatttggagcgctttcaggcctatgttgaaaaaggaaatatcttcccataaaaactagacggaggcattctcagaaacttatttgtgatgtgtttgctcaactaacaggattgaaccatcgttttgaaggagcagttttgaaacactgttttcgtggaatctgcaagtggatatttggctagctttgaggatttcgttggaaacgggattacatataaaaaggagacagcagcattctcagaaacttctttgtgatgtctgcattcaattcacagagttgagcattccctttcatagagcaggttggaaacactctttttgtagtatctggatgaggacatttggagcgctttcaggcgtatggtgaaaaaggaaatatcttcccgtaaaaactagacagaagcattctcagaagtttatttgtgatgtgtgccctcaactaacagagttgaacctttcttttgatagagcagttttgaaacactctttttgtaaaatctgcaagaggatatttggatagctttgaggatttcgttgcaaacgggaatggcttcatataaactctagacagaagcattctcagaaacttcgttgggatgtttcgattgaagtcccagtgttgaacattcccttttatagagcaggttggaaacactctttctgcattccctggaagtggacatttggagcgctttcaggacgacggtgaaaatggaaatatcttccaagaaaatctagatagaagcaatgtcagaaacttttatgtgatggatctactcagctaacagagttgaacctttcttttgagagagcagttttgcaacactctttttgtggaatatgcaagtggatattagggcagctttgaggatttcgttggaaacgggaatacatgtaaaaagcagacagcagcattctcagaaacttctttgtgatgtttgcattgaagtcacagagttgaacattccctttgagagagcaggtttgaaacacgccttttgtcatatctggaagtgtccattcggagcgcattcaggcttgtgttgaaaaaggaaatatcctcccataaaaactagacagaagcattctcagaaacttatctgtgatgtatgtactcaactaacagaactaaaccatcgttttgaaggagcagttttgaaacactctttttgcggaatctgcaagtggatatttggctagctgggaggatttcgttggaaacgggattacatacaaaaagcagacagcagcattctcagaaacttctttgtgatgtttgcattcaagtcacagagttgaacattccctttcatagagcaggttggaaacactctttttgtagtatctggatgtggacatttggatcgctttcaggcctatggtgaaaaaggaaatatcttcccatgaaaactagacagaagcattctcagaaacttatttgtgatgtgtgccctcaactgacagtgttgaacctttgttttgatagagcagttctgaaacacactttttgtaaaatctgcaagaggatatttggatagctttgaggatttcgttggaaacgggaatgtcttcatgtaaactctagacagaagcattctcagaaactgctttgggatgtttcaattgaagtcccagtgttgaacattccctttcatagagcaggtttgaaacactctttttgtactatctggaagtggacatttggagcgctttcaggtctacggtgaaaaaggagatatcttccaataaaaactagatagaagcaatgtcagaacttttttcatgatgtatctactcagcaaacagagttgaacctttcttttgagagagcagttttgacacagtctttgtggaatatgcaagtgggtattaggccagcttggaggatttcgttggaaacgggaatacgtataaaaagcagacagcagcattgtcagaaactactttgtgatgtttgcattcaagtcacagaattgaacactccctttcacagagcaggtttgaaacactctttttgtagtgtctgtaagtgaacatttggattgctttcaggcctaaggtgaaaaaggaaatatcttcccataaaaactagacagaagcattctcagaaacttgtttgtgatgtgtgccctctactgacagagttgaacctttctttgcaaagagcagttttgaaacactctttttgtagaatctgcaagaggatatttggatagctttgaggatttcttgggaaacgggaatgtcttcagataaactctagacagaagcattctcagaaacttctttgggatgtttcaattgaagtcacagtgttgaacattccctttcacagagcaggtttgaaacagtctttttgtagtgtctataagtgaacatttggcgtgctttcaggcctaacgtgaaaaaggaaatctcttcccataaaaactagacagaagcattctcagaaacttgtttgtgatgtgtgccctctactgacagagttgaacctttctttgcaaagagcagctttgaaacactctttttgtagaatctgcaagaggatatttggatagctttgaggatttcgttggaaacgggtatgtcttcacataaactctagacagaagcattctcagaaacttctttgggatgttgcattcaagtcacagagtagaacattcccattcatagagcagatttgaaacactctttttgtagtatctggaagtggacatttggagcgctttcaggcctatgttgagaaacgaaatatcttcccataaaaactagacggaagcattctcagaaacttatttctgatgtgtttgctcaactaacagaattgaaccatcgttttgaaggagcagttttgaaaccctgttttcgtggaatctgcaagtggatatttggctagctttgaggatttcgttggaaacgggattacctataaaaaggagacagcagcattctcagaaacttctttgtgatgtctgcattcaagtcacagagttgagcattccctttcatagagcaggtttgaaacactctttttgtagtatctggatgaggacatttggagcgctttcaggcgtatggtgaaaaaggaaatatcttcccgtaaaaactagacagaagcattctcagaaatttatttgtgatgtgtgccctcaactaacagagttgaacctttcttttgatagagcagttttgaaacactctttttgtaaaatctgcaagaggatatttggatagctttgaggatttcgttgcaaacgggaatggcttcatataaactctagacagaagcattctcagaaacttcgttgggatgtttcgattgaagtcccagtgttgaacattcccttttatagagcaggttggaaacactctttttgcattccctggaagtggacatttggagcgctttcaggacgacggtgaaaatggaaatatcttccaataaaatctagatagaagcaatgtcagaaacttttctgtgatggatctactcagctaacagagttgaacctttcttttgagagagcagttttgcaacactctttttgtggaatatgcaagtggatattagggcagctttgaggatttcgttggaaacgggaatacatgtaaaaagcagacagcagcattctcagaaacttctttgtgatgtttgcattgaagtcacagagttgaacattccctttgagagagcaggtttgcaacacgccttttgtcatatctggaagtgtccattcggagcgcattcaggcttgtgttgaaaaaggaaatatcctcccataaaaactagacagaagcattctcagaaacttatttgtgatgtatgtactcaactaacagaactaaaccatcgttttgaaggagcagttttgaaacactctttttgcggaatctgcaactggatatttggctagcttggaggatttcgttggaaacgggattacataaaaaagcagacagcagcattctcagaaacttctttgtgatgtttgcattcaagtcgcagagttgaacattccctttcatagagcaggtttgaaacactctttttgtagtatctggatgtggacatttggatcgctttcaggcctatggtgaaaaaggaaatatcttcccatgaaaactagacagaagcattctcagaaacttatttgtgatgtgtgccctcaactgacagtgttgaacctttgttttgatagagcagttctgaaacacactttttgtaaaatctgcaagaggatatttggatagctttgaggatttcgttggaaacgggaatgtcttcatgtaaactctagacagaagcattctcagaaactgctttgggatgtttcaattgaagtcccagtgttgaacattccctttcatagagcaggtttgaaacactctttttgtagtatctggaagtggacatttggagcgctttcaggtctacggtgaaaaaggagatatcttccaataaaaactagatagaagcaatgtcagaacttttttcatgatgtatctactcagcaaacagagttgaacctttcttttgagagagcagttttgaaacactctttttgtggaatatgcaagtgggtattaggccaccttggaggatatcgttggaaacgggaatacgtataaaaagcagacagcagcattgtcagaaactactttgtgatgtttgcattcaagtcacagaattgaacactccctttcacagagcaggtttgaaacactctttttgtagtgtctgtaagtgaacatttggattgctttcaggcctaaggtgaaaaaggaaatatcttcccataaaaactagacagaagcattctcagaaacttgtttgtgatgtgtgccctctactgacagagttgaacctttctttgcaaagagcagttttgaaacactctttttgtagaatctgcaagaggatatttggatagctttgaggatttcttgggaaacgggaatgtcttcagataaactctagacagaagaattctcagaaacttctttgggatgtttcaattgaagtcacagtgttgaacattccctttcacagagcaggtttgaaacactctttttgtagtgtctataagtgaacatttggcgtgctttcaggcctaacgtgaaaaaggaaatatcttcccataaaaactagacagaagcattctcagaaacttgttcatgatgtgtgccctctactgacagagttgaacctttctttgcaaagagcagctttgaaacactctttttgtagaatctgcaagaggatatttggatagctttgaggatttcgttggaaacgggtatgtcttcagataaactctagacagaagcattctcagaaacttctttgggatgttgcattcaagtcacagagtagaacattcccattcatagagcagatttgaaacactctttttgtagtatctggaagtggacatttggagcgctttcaggcctatgttgaaaaaggaaatatcttcccataaaaactagacggaagcattctcagaaacttacttgtgatgtgtttgctcaactaacagaattgaaccatcgctttgaaggagcagttttgaaacactgttttcgtggaatctgcaagtggatatttggctagctttgaggatttcgttggaaacgggattacatataaaaaggagacagcagcattctcagaaacttctttgtgatgtctgcattcaagtcacagagttgagcattccctttcatagagcaggttggaaacactctttttgtagtatctggatgaggacatttggagcgctttcaggcgtatggtgaaaaaggaaatatcttcccgtaaaaactagacagaagcattctcagaaatttatttgtgatgtgtgccctcaactaacagagttgaacctttcttttgatagagcagttttgaaacactctttttgtaaaatctgcaagaggatatttggatagctttgaggatttcgttgcaaacgggaatggcttcatataaactcctagacagaagcattctcaagaaacttcgttgggatgtttcgattgaagtcccagtgttgaacattcccttttatagagcaggttggaaacactctttctgcattccctggaagtggacatttggagcgctttcaggacgacggtgaaaatggaaatatcttccaagaaaatctagatagaagcaatgtcagaaacttttatgtgatggatctactcagctaacagagttgaacctttcttttgagagagcagttttgcaacactctttttgtggaatatgcaagtggatattagggcagctttgaggatttcgttggaaacgggaatacatgtaaaaagcagacagcagcattctcagaaacttctttgtgatgtttgcattgaagtcacagagttgaacattccctttgagagagcaggtttgaaacacgccttttgtcatatctggaagtgtccattcggagcgcattcaggcttgtgttgaaaaaggaaatatcctcccataaaaactagacagaagcattctcagaaacttatctgtgatgtatgtactcaactaacagaactaaaccatcgttttgaaggagcagttttgaaacactctttttgcggaatctgcaagtggatatttggctagctgggaggatttcgttggaaacgggattacatacaaaaagcagacagcagcattctcagaaacttctttgtgatgtttgcattcaagtcacagagttgaacattccctttcatagagcaggtttgaaacactctttttgtagtatctggatgtggacatttggatcgctttcaggcctatggtgaaaaaggaaatatcttcccatgaaaactagacagaagcattctcagaaacttatttgtgatgtgtgccctcaactgacagtgttgaacctttgttttgatagagcagttctgaaacacactttttgtaaaatctgcaagaggatatttggatagctttgaggatttcgttggaaacgggaatgtcttcatgtaaactctagacagaagcattctcagaaactgctttgggatgtttcaattgaagtcccagtgttgaacattcccattcatagagcaggtttgaaacactctttttgtactatctggaagtggacatttggagcgctttcaggtctacggtgaaaaaggagatatcttccaataaaaactagatagaagcaatgtcagaacttttttcatgatgtatctactcagcaaacagagttgaacctttcttttgagagagcagttttgaaacactctttttgtggaatatgcaagtgggtattaggccagcttggaggatttcgttggaaacgggaatacgtataaaaagcagacagcagcattgtcagaaactactttgtgatgtttgcattcaagtcacagaattgaacactccctttcacagagcaggtttgaaacactctttttgtagtgtctgtaagtgaacatatggattgctttcaggcctaaggtgaaaaaggaaatatcttcccataaaaactagacagaagcattctcagaaacttgtttgtgatgtgtgccctctactgacagagttgaacctttctttgcaaagagcagttttgaaacactctttttgtagaatctgcaagaggatatttggatagctttgaggatttcttgggaaacgggaatgtcttcagataaactctagacagaagcattctcagaaacttctttgggatgtttcaattgaagtcacagtgttgaacattccctttcacagagcaggtttgaaacactctttttgtagtgtctataagtgaacatttggcgtgctttcaggcgtaacgtgaaaaaggaaatatcttcccataaaaaccagacagaagcattctcagaaacttgttcctgatgtgtgccctctaactgacagagttgaacctttctttgcaaagagcagctttgaaacactctttttgtagaatctgcaagaggatatttggatagctttgaggatttcgttggaaacggggatgtcttcagataaactctagacagaagcattctcagaaacttctttgggatgttgcattcaagtcacagagtagaacattcccattcatagagcagatttgaaacactctttttgtagtatctggaagtggacatttggagcgctttcaggcctatgttgaaaaaggaaatatcttcccataaaaactagacggaagcattctcagaaacttatttgtgatgtgtttgctcaactaacaggattgaaccatcgttttgaaggagcagttttgaaacactgttttcgtggaatctgcaagtggatatttggctatctttgaggatttcgttggaaacgggattacatataaaaaggagacagcagcattctcagaaacttctttgtgatgtctgcattcaagtcacagagttgagcattccctttcatagagcaggttggaaacactctttttgtagtatctggatgaggacatttggagcgctttcaggcgtatggtgaaaaaggaaatatcttcccgtaaaaactagacagaagcattctcagaaatttatttgtgatgtgtgccctcaactaacagagttgaacctttcttttgatagagcagttttgaaacactctttttgtaaaatctgcaagaggatatttggatagctttgaggatttcattgcaaacgggaatggcttcatataaactctagacagaagcattctcagaaacttcgttgggatgtttcgattgaagtcccagtgttgaacattcccttttatagagcaggttggaaacactctttctgcattccctggaagtggacatttggagcgctttcaggacgacggtgaaaatggaaatatcttccaagaaaatctagatagaagcaacgtcagaaacttttatgtgatggatctactcagctaacagagttgaacctttcttttgagagagcagttttgcaacactctttttgtggaatatgcaagtggatattagggcagctttgaggatttcgttggaaacgggaatacatgtaaaaagcagacagcagcattctcagaaacttctttgtgatgtttgcattgaagtcacagagttgaacattccctttgagagagcaggtttgaaacacgccttttgtcatatctggaagtgtccattcggagcgcattcaggcttgtgttgaaaaaggaaatatcctcccataaaaactagacagaagcattctcagaaacttatctgtgatgtatgtactcaactaacagaactaaaccatcgttttgaaggagcagttttgaaacactctttttgcggaatctgcaagtggatatttggctagcttggaggatttcgttggaaacgggattacatacaaaaagcagagagcagcattctcagaaacttctttgtgatgtttgcattcaagtcacagagttgaacattccctttcatagagcaggtttgaaacactctttttgtagtatctggatgtggacatttggatcgctttcaggcctatggtgaaaaaggaaatatcttcccatgaaaactagacagaagcattctcagaaacttatttgtgatgtgtgccctcaactgacagtgttgaacctttgttttgatagagcagttctgaaacacactttttgtaaaatctgcaagaggatatttggatagctttgaggatttcgttggaaacgggaatgtcttcatgtaaactctagacagaagcattctcagaaactgctttgggatgtttcaattgaagtcccagtgttgaacattccctttcatagagcaggtttgaaacactctttttgtactatctggaagtggacatttggagcgctttcaggtctacggtgaaaaaggagatatcttccaataaaaactagatagaagcaatgtcagaacttttttcatgatgtatctactcagcaaacagagttgaacctttcttttgagagagcagttttgaaacactctttttgtggaatatgcaagtgggtattaggccagcttggaggatttcgttggaaacgggaatacgtataaaaagcagacagcagcattgtcagaaactactttgtgatgtttgcattcaagtcacagaattgaacactccctttcacagagcaggtttgaaacactctttttgtagtgtctgtaagtgaacatttggattgctttcaggcctaaggtgaaaaaggaaatatcttcccataaaaactagacagaagcattctcagaaacttgtttgtgatgtgtgccctctactgacagagttgaacctttctttgcaaagagcagttttgaaacactctttttgtagaatctgcaagaggatatttggatagctttgaggatttcttgggaaacgggaatgtcttcagataaactctagacagaagcattctcagaaacttctttgggatgtttcaattgaagtcacagtgttgaacattccctttcacagagcaggtttgaaacactctttttgtagtgtctataagtgaacatttggcgtgctttcaggcctaacgtgaaaaaggaaatatcttcccataaaaactagacagaagcattctcagaaacttgttcgtgatgtgtgccctctactgacagagttgaacctttctttgcaaagagcagctttgaaacactctttttgtagaatctgcaagaggatatttggatagctttgaggatttcgttggaaacgggtatgtcttcagataaactctagacagaagcattctcagaaacttctttgggatgttgcattcaagtcacagagtagaacattcccattcatagagcagatttgaaacactctttttgtagtatctggaagtggacatttggagcgctttcaggcctatgttgaaaaaggaaatatcttcccataaaaactagacggaagcattctcagaaacttacttgtgatgtgtttgctcaactaacagaattgaaccatcgttttgaaggagcagttttgaaacactgttttcgtggaatctgcaagtggaaatttggctagctttgaggatttcgttggaaacgggattacatataaaaaggagacagcagcattctcagaaacttctttgtgatgtctgcattcaagtcacagagttgagcattccctttcatagagcaggttggaaacactctttttgtagtatctggatgaggacatttggagcgctttcaggcgtatggtgaaaaaggaaatatcttcccgtaaaaactagacagaagcattctcagaaatttatttgtgatgtgtgccctcaactaacagagttgaacctttcttttgatagagcagttttgaaacactctttttgtaaaatctgcaagaggatatttggatagctttgaggatttcgttgcaaacgggaatggcttcatataaactctagacagaagcattctcagaaacttcgttgggatgtttcgattgaagtcccagtgttgaacattcccttttatagagcaggttggaaacactctttctgcattccctggaagtgtacatttggagcgctttcaggacgacggtgaaaatggaaatatcttccaagaaaatctagatagaagcaacgtcagaaacttttatgtgatggatctactcagctaacagagttgaacctttcttttgagagagcagttttgcaacactctttttgtggaatatgcaagtggatattagggcagctttgaggatttcgttggaaacgggaatacatgtaaaaagcagacagcagcattctcagaaacttctttgtgatgtttgcattgaagtcacagagttgaacattccctttgagagagcaggtttgaaacacgccttttgtcatatctggaagtgtccattcggagcgcattcaggcttgtgttgaaaaaggaaatatcctcccataaaaactagacagaagcattctcagaaacttatctgtgatgtatgtactcaactaacagaactaaaccatcgttttgaaggagcagttttgaaacactctttttgcggaatctgcaagtggatatttggctagctgggaggatttcgttggaaacgggattacatacaaaaagcagacagcagcattctcagaaacttctttgtgatgtttgcattcaagtcacagagttgaacattccctttcatagagcaggtttgaaacactctttttgtagtatctggatgtggacatttggatcgctttcaggcctatggtgaaaaaggaaatatcttcccatgaaaactagacagaagcattctcagaaacttatttgtgatgtgtgccctcaactgacagtgttgaacctttgttttgatagagcagttctgaaacacactttttgtaaaatctgcaagaggatatttggatagctttgaggatttcgttggaaacgggaatgtcttcatgtaaactctacacagaagcattctcagaaactgctttgggatgtttcaattgaagtcccagtgttgaacattcccattcatagagcaggtttgaagcactctttttgtactatctggaagtggacatttggagcgctttcaggtctacggtgaaaaaggagatatcttccaataaaaactagatagaagcaatgtcagaacttttttcatgatgtatctactcagcaaacagagttgaacctttcttttgagagagcagttttgaaacactctttttgtggaatatgaaagtgggtattaggccagcttggaggatttcgttggaaacgggaatacgtataaaaagcagacagcagcattgtcagaaactactttgtgatgtttgcattcaagtcacagaactgaacactccctttcacagagcaggtttgaaacactctttttgtagtgtctgtaagtgaacatttggattgctttcaggcctaaggtgaaaaaggaaatatcttcccataaaaactagacagaagcattctcagaaacttgtttgtgatgtgtgccctctactgacagagttgaacctttctttgcaaagagcagttttgaaacactctttttgtagaatctgcaagaggatatttggatagctttgaggatttcttgggaaacgggaatgtcttcagataaactctagacagaagcattctcagaaacttctttgggatgtttcaattgaagtcacagtgttgaacattccctttcacagagcaggtttgaaacactctttttgtagtgtctataattgaacatttggcgtgctttcaggcctaacgtgaaaaaggaaatatcttcccataaaaactagacagaagcattctcagaaacttgttcgtgatgcgtgccctctactgacagagttgaacctttctttgcaaagagcagctttgaaacactctttttgtagaatctgcaagaggatatgtggatagctttgaggatttcgttggaaacgggtatgtcttcagataaactctagacagaagcattctcagaaacttctttgggatgtttcaattgaagtcacagtgttgaacattccctttcacagagcaggtttgaaacactctttttgtagtgactataagtgaacatttggcgtgctttcaggcctaacgtgaaaaaggaaatatcttcccataaaaactagacagaagcattctcagaaacttgttcatgatgtgtgccctctactgacagagttgaacctttctttgcaaagagcagctttgaaacactctttttgtagaatctgcaagaggatatttggatagctttgaggatttcgttggaaacgggtatgtcttcagataaactctagacagaagcattctcagaaacttctttgggatgttgcattcaagtcacagagtagaacattcccattcatagagcagatttgaaacactctttttgtagtatctggaagtggacatttggagcgctttcaggcctatgttgaaaaaggaaatatcttcccataaaaactagacggaagcattctcagaaacttacttgtgatgtgtttgctcaactaacagaattgaaccatcgttttgaaggagcagttttgaaacactgttttcgtggaatctgcaagtggatatttggctagctttgaggatttcgttggaaacgggattacatataaaaaggagacagcagcattctcagaaacttctttgtgatgtctgcattcaagtcacagagttgagcattccctttcatagagcaggttggaaacactctttttgtagtatctggatgaggacatttggagcgctttcaggcgtatggtgaaaaaggaaatatcttcccgtaaaaactagacagaagcattctcagaagtttatttgtgatgtgtgccctcaactaacagagttgaacctttcttttgatacagcagttttgaaacactctttttgtaaaatctgctagagtatatttggatagctttgaggatttcgttgcaaacgggaatggcttcatataaactctagacagaagcattctcagaaacttcgttgggatgtttcgattgaagtcccagtgttgaacattcccttttatagagcaggttggaaacactctttctgcattccctggaagtggacatttggagcgctttcaggacgacggtgaaaatggaaatatcttccaagaaaatctagatagaagcaacgtcagaaacttttctgtgatggatctactcagctaacagagttgaacctttcttttgagagagcagttttgcaacactctttttgtggaatatgcaagtggatattagggcagctttgaggatttcgttggaaacgggaatacatgtaaaaagcagacagcagcattctcagaaacttctttgtgatgtttgcattgaagtcacagagttgaacattccctttgagagagcaggtttgaaacacgccttttgtcatatctggaagtgtccattcggagcgcattcaggcttgtgttgaaaaaggaaatatcctcccataaaaactagacagaagcattctcagaaacttatctgtgatgtatgtactcaactaacagaactaaaccatcgttttgaaggagcagttttgaaacactctttttgcgcaatctgcaagtggatatttggctagctgggaggatttcgttggaaacgggattacatacaaaaagcagagagcagcattctcagaaacttctttgtgatgtttgcattcaagtcacagagttgaacattccctttcatagagcaggtttgaaacactctttttgtagtatctggatgtggacatttggatcgctttcaggcctatggtgaaaaaggaaatatcttcccatgaaaactagacagaagcattctcagaaacttatttgtgatgtgtgccctcaactgacagtgttgaacctttgttttgatagagcagttctgaaacacactttttgtaaaatctgcaagaggatatttggatagctttgaggatttcgttggaaacgggaatgtcttcatgtaaactctagacagaagcattctcagaaactgctttgggatgtttcaattgaagtcccagtgttgaacattcccattcatagagcaggtttgaaacactctttttgtactatctggaagtggacatttggagcgctttcaggtctacggtgaaaaaggagatatcttccaataaaaactagatagaagcaatgtcagaacttttttcatgatgtatctactcagcacacagagttgaacctttcttttgagagagcagttttgaaacactctttttgtggaatatgcaagtgggtattaggccagcttggaggatttcgttggaaacgggaatacgtataaaaagcagacagcagcattgtcagaaactactttgtgatgtttgcattcaagtcacagaattgaacactccctttcacagagcaggtttgaaacactctttttgtagtgtctgtaagtgaacatatggattgctttcaggcctaaggtgaaaaaggaaatatcttcccataaaaactagacagaagcattctcagaaacttgtttgtgatgtgtgccctctactgacagagttgaacctttctttgcaaagagcagttttgaaacactctttttgtagaatctgcaagaggatatttggatagctttgaagatttcttgggaaacgggaatgtcttcagataaactctagacagaagcattctcagaaacttctttgggatgtttcaattgaagtcacagtgttgaacattccctttcacagagcaggtttgaaacactctttttgtagtgtctataagtgaacatttggcgtgctttcaggcctaacgtgaaaaattaaatatcttcccataaaaactagacagaagcattctcagaaacttgttcatgatgtgtgccctctactgacagtgttgaacctttctttgcaaagagcagctttgaaacactctttttgtagaatctgcaagaggatatttggatagctttgaggatttcgttggaaacgggtatgtcttcagataaactctagacagaagcattctcagaaacttctttgggatgttgcattcaagtcacagagtagaacattcccattcatagagcagatttgaaacactctttttgtagtatctggaagtggacatttggagcgctttcaggcctatgttgaaaaaggaaatatcttcccataaaaactagacggaagcattctcagaaacttacttgtgatgtgtttgctcaactaacagaattgaaccatcgttttgaaggagcagttttgaaacactgttttcgtggaatctgcaagtggatatttggctagctttgaggatttcgttggaaacgggattacatataaaaaggagacagcagcattctcagaaacttctttgtgatgcctgcattcaagtcacagagttgagcattccctttcatagagcaggttggaaacactctttttgtagtatctggatgaggacatttggagcgctttcaggcgtatggtgaaaaaggaaatatcttcccgtaaaaaccagacagaagcattctcagaaatttatttgtgatgtgtgccctcaactaacagagttgatcctttcttttgatagagcagttttgaaacactctttttgtaaaatctgcaagaggatatttggatacctttgaggatttcgttgcaaacgggaatggcttcatataaactctagacagaagcattctcagaaacttcgttgggatgtttcgattgaagtcccagtgttgaacattcccttttatagagcaggttggaaacactctttctgcattccctggaagtggacatttggagcgctttcaggacgacggtgaaaatggaaatatcttccaagaaaatctagatagaagcaatgtcagaaacttttatgtgatggatctactcagctaacagagttgaacctttcttttgagagagcagttttgcaacactctttttgtggaatatgcaagtggatatttgggcagctttgaggatttcgttggaaacgggaatacatgtaaaaagcagacagcagcattctcagaaacttctttgtgatgtttgcattgaagtcacagagttgaacattccctttgagagagcaggtttgaaacacgccttttgtcatatctggaagtgtccattcggagcgcattcaggcttgtgttgaaaaaggaaatatcctcccataaaaactagacagaagcattctcagaaacttatctgtgatgtatgtactcaactaacagaactaaaccatcgttttgaaggagcagttttgaaacactctttttgcggaatctgcaagtggatatttggctagctgggaggatttcgttggaaacgggattacatacaaaaagcagacagcagcattctcagaaacttctttgtgatgtttgcattcaagtcacagagttgaacattccctttcatagagcaggtttgaaacactctttttgtagtatctggatgtggacatttggatcgctttcaggcctatggtgaaaaaggaaatatcttcccatgaaaactagacagaagcattctcagaaacttatttgtgatgtgtgccctcaactgacagtgttgaacctttgttttgatagagcagttctgaaacacactttttgtaaaatctgcaagaggatatttggatagctttgaggatttcgttggaaacgggaatgtcttcatgtaaactctacacagaagcattctcagaaactgctttgggatgtttcaattgaagtcccagtgttgaacattcccattcatagagcaggtttgaaacactctttttgtaatatctggaagtggacatttggagcgctttcaggtctacggtgaaaaaggagatatcttccaataaaaactagatagaagcaatgtcagaacttttttcatgatgtatctactcagctaacagagttgaacctttcttttgagagagcagttttgaaacactctttttgtggaatatgcaagtgggtattaggccagcttggaggatttcgttggaaacgggaatacgtataaaaagcagacagcagcattgtcagaaactactttgtgatgtttgcattcaagtcacagaactgaacactccctttcacagagcaggtttgaaacactctttttgtagtgtctgtaagtgaacatttggattgctttcaggcctaaggtgaaaaaggaaatatcttcccataaaaactagacagaagcattctcagaaacttgtttgtgatgtgtgccctctactgacagagttgaacctttctttgcaaagagcagttttgaaacactctttttgtagaatctgcaagaggatatttggatagctttgaggatttcttgggaaacgggaatgtcttcagataaactctagacagaagcattctcagaaacttctttgggatgtttcaattgaagtcacagtgttgaacattccctttcacagagcaggtttgaaacactctttttgtagtgtctataagtgaacatttggcgtgctttcaggcgtaacgtgaaaaaggaaatatcttcccataaaaaccagacagaagcattctcagaaacttgtttgtgatgtgtgccctctactgacagagttgaacctttctttgcaaagagcagctttgaaacactctttttgtagaatctgcaagaggatatgtggatagctttgaggatttcgttggaaacgggtatgtcttcagataaactctagacagaagcattctcagaaacttctttgggatgttgcattcaagtcacagagtagaacattcccattcatagagcagatttgaaacactctttttgtagtatctggaagtggacatttggagcgctttcaggcctatgttgaaaaaggaaatatcttcccataaaaactagacggaagcattctcagaaacttatttgtgatgtgtttgctcaactaacaggattgaaccatcgttttgaaggagcagttttgaaacactgttttcgtggaatctgcaagtggatatttggctagctttgaggatttcgttggaaacgggattacatataaaaaggagacagcagcattctcagaaacttctttgtgatgtttgcattcaattcacagagttgagcattccctttcatagagcaggtttgaaacactctttttgtagtatctggatgtggacatttggatcgctttcaggcctatggtgaaaaaggaaatatcttcccatgaaaactagacagaagcattctcagaaacttatttgtgatgtgtgccctcaactgacagtgttgaacctttgttttgatagagcagttctgaaacacactttttgtaaaatctgcaagaggatatttggatagctttgaggatttcgttggaaacgggaatgtcttcatgtaaactctagacagaagcattctcagaaactgctttgggatgtttcaattgaagtcccagtgttgaacattcccattcatagagcaggtttgaaacactctttttgtactatctggaagtggacatttggagcgctttcaggtctacgatgaaaaaggagatatcttccaataaaaactagatagaagcaatgtcagaacttttttcatgatgtatctactcagcaaacagagttgaacctttcttttgagagagcagttttgaaacactctttttgtggaatatgcaagtgggtattaggccagcttggaggatttcgttggaaacgggaatacgtataaaaagcagacagcagcattgtcagaaactactttgtgatgtttgcattcaagtcacagaattgaacactccctttcacagagcaggtttgaaacactctttttgtagtgtctataagtgaacatttggcgtgctttcaggcctaaggtgaaaaaggaaatatcttcccataaaaactagacagaagcattctcagaaacttgttcgtgatgtgtgccctctactgacagagttgaacctttctttgcaaagagcagctttgaaacactctttttgtagaatctgcaagaggatatttggatagctttgaggatttcgttggaaacgggtatgtcttcagataaactctagacagaagcattctcagaaacttctttgggatgttgcattcaagtcacagagtagaacattcccattcatagagcagatttgaaacactctttttgtagtatctggaagtggacatttggagcgctttcaggcctatgttgaaaaaggaaatatcttcccataaaaactagacggaagcattctcagaaacttatttgtgatgtgtttgctcaactaacaggattgaaccatcgttttgaaggagcagttttgaaacactgttttcgtggaatctgcaagtggatatttggctagctttgaggatttcgttggaaacgggattacatatacaaaggagacagcagcattctcagaaacttctttgtgatgtctgcattcaattcacagagttgagcattccctttcatagagcaggttggaaacactctttttgtagtatctggatgaggacatttggagcgctttcaggcgtatggtgaaaaaggaaatatcttcccgtaaaaactagacagaagcattctcagaagtttatttgtgatgtgtgccctcaactaacagacttgaacctttcttttgatagagcagttttgaaacactctttttgtaaaatctgcaagaggatatttggatagctttgaggatttcgttgcaaacgggaatggcttcatataaactctagacagaagcattctcagaaacttcgttgggatgtttcgattgaagtcccagtgttgaacattcccttttatagagcaggttggaaacactctttctgcattccctggaagtggacatttggagcgctttcaggacgacggtgaaaatggaaatatcttccaagaaaatctagatagaagcaacgtcagaaacttttctgtgatggatctacttagctaccagagttgaacctttcttttgagagagcagttttgcaacactctttttgtggaatatgcaagtggatattagggcagctttgaggatttcgttggaaacgggaatacatgtaaaaagcagacagcagcattctcagaaacttctttgtgatgtttgcattgaagtcacagagttgaacattccctttgagagagcaggtttgaaacacgccttttgtcatatctggaagtgtccattcggagcgcattcaggcttgtgttgaaaaaggaaatatcctcccataaaaactagacagaagcattctcagaaacttatctctgatgtatgtactcaactaacagaactaaaccatcgttttgaaggagcagttttgaaacactctttttgcggaatctgcaagtggatatttggctagctgggaggatttcgttggaaacgggattacatacaaaaagcagacagcagcattctcagaaacttctttgtgatgtttgcattcaagtcacagagttgaacattccctttcatagagcaggtttgaaacactctttttgtagtatctggatgtggacatttggatcgctttcaggcctatggtgaaaaaggaaatatcttcccatgaaaactagacagaagcattctcagaaacttatttgtgatgtgtgccctcaactgacagtgttgaacctttgttttgatagagcagttctgaaacacactttttgtaaaatctgcaagaggatatttggatagctttgaggatttcgttggaaacgggaatgtcttcatgtaaactctagacagaagcattctcagaaactgctttgggatgtttcaattgaagtcccagtgttgaacattccctttcatagagcaggtttgaaacactctttttgtactatctggaagtggacatttggagcgctttcaggtctacggtgaaaaaggagatatcttccaataaaaactagatagaagcaatgtcagaacttttttcatgatgtatctactcagcaaacagagttgaacctttcttttgagagagcagttttgaaacactctttttgtggaatatgcaagtgggtattaggccagcttggaggatttcgttggaaacgggaatacgtataaaaagcagacagcagcattgtcagaaactactttgtgatgttggcattcaagtcacagaattgaacactccctttcacagagcaggtttgaaacactctttttgtagtgtctgtaagtgaacatttggattgctttcaggcctaaggtgaaaaaggaaatatcttcccataaaaactagacagaagcattctcagaacttgtttgtgatgtgtgccctctactgacagagttgaaactttctttgcaaagagcagttttgaaacactctttttgtagaatctgcaagaggatatttggatagctttgaggatttcttgggaaacgggaatgtcttcagataaactctagacagaagcattctcagaaacttctttgggatgtttcaattgaagtcacagtgttgaacattccctttcacagagcaggtttgaaacactctttttgtagtgtgtataagtgaacatttcgcgtgctttcaggcctaacgtgaaaaaggaaatatcttcccataaaaactagacagaagcattctcagaaacttgttcatgatgtgtgccctctactgacagagttgaacctttctttgcaaagagcagctttgaaacactctttttgtagaatctgcaagaggatatttggatagcttggaggatttcgttggaaacgggtatgtcttcagataaactctagacagaagcattctcagaaacttctttgggatgttgcattcaagtcacagagtagaacattcccattcatagagcagatttgaaacactctttttgtagtatctggaagtggacatttggagcgctttcaggcctatgttgaaaaaggaaatatcttcccataaaaactagacggaagcattctcagaaacttacttgtgatgtgtttgctcaactaacagaattgaaccatcgttttgaaggagcagttttgaaacactgttttcgtggaatctgcaagtggatatttggctagctttgaggatttcgttggaaacgggattacatataaaaaggagacagcagcattctcagaaacttctttgtgatgtctgcattcaagtcacagagttgagcattccctttcatagagcaggttggaaacactctttttgtagtatctggatgaggacatttggagcgctttcaggcgtatggtgaaaaaggaaatatcttcccgtaaaaactagacagaagcattctcagaaatttatttgtgatgtgtgccctcaactaacagagttgaacctttcttttgatagagcagttttgaaacactctttttgtaaaatctgcaagaggatatttggatagctttgaggatttcgttgcaaacggaatggcttcatataaactctagacagaagcattctcagaaacttcgttgggatgtttcgattgaagtcccagtgttgaacattcccttttatagagcaggttggaaacactctttctgcattccctggacgtggacatttggagcgctttctggacgacggtgaaaatggaaatatcttccaagaaaatctagatagaagcaatgtcagaaacttttatgtgatggatctactcagctaacagagttgaacctttcttttgagagagcagttttgcaacactctttttgtggaatatgcaagtggatattagggcagctttgaggatttcgttggaaacgggaatacatgtaaaaagcagacagcagcattctcagaaacttctttgtgatgtttgcattgaagtcacagagttgaacattccctttgagagagcaggtttgaaacacgccttttgtcatatctggaagtgtccattcggagcgcattcaggcttgtgttgaaaaaggaaatatcctcccataaaaactagacagaagcattctcagaaacttatctgtgatgtatgtactcaactaacagaactaaaccatcgttttgaaggagcagttttgaaacactctttttgcggaatctgcaagtggatatttggctagctgggaggatttcgttggaaacgggattacatacaaaaagcagacagcagcattctcagaaacttctttgtgatgtttgcattcaagtcacagagttgaacattccctttcatagagcaggtttgaaacactctttttgtagtatctggatgtggacatttggatcgctttcaggcctatggtgaaaaaggaaatatcttccccatgaaaactagacagatagcattctcagaaacttatttgtgatgtgtgccctcaactgacagtgttgaacctttgttttgatagagcagttctgaaacacactttttgtaaaatctgcaagaggatatttggatagctttgaggatttcgttggaaacgggaatgtcttcatgtaaactctagacagagcattctcagaaactgctttgggatgtttcaattgaagtcccagtgttgaacattcccattcatagagcaggtttgaaacactctttttgtactatctggaagtggacatttggagcgctttcaggtctacggtgaaaaaggagatatcttccaataaaaactagatagaagcaatgtcagaacttttttcatgatgtatctactcagcaaacagagttgaacctttcttttgagagagcagttttgaaacactctttttgtggaatatgcaagtgggtattaggccagcttggaggatttcgttggaaacgggaatacgtataaaaagcagacagcagcattgtcagaaactactttgtgatgtttgcattcaagtcacagaattgaacactccctttcacagagcaggtttgaaacactctttttgtagtgtctgtaagtgaacatttggattgcttcaggcctaaggtgaaaaaggaaatatcttcccataaaaactagacagaagcattctcagcaaacttgtttgtgatgtgtgccctctactgacagagttgaaactttctttgcaaagagcagttttgaaacactctttttgtagaatctgcaagaggatatttggatagctttgaggatttcttgggaaacgggaatgtcttcagataaactctagacagaagcattctcagaaacttctttgggatgtttcaattgaagtcacagtgttgaacattccctttcacagagcaggtttgaaacactctttttgtagtgtctataagtgaacatttggcgtgctttcaggcctaacgtgaaaaaggaaatatcttcccataaaaactagacagaagcattctcagaaacttgttcgtgatgtgtgccctctactgacagagttgaacctttctttgcaaagagcagctttgaaacactctttttgtagaatctccaagaggatatttggatagcttggaggatttcgttggaaacgggtatgtcttcagataaactctagacagaagcattctcagaaacttctttgggatgttgcattcaagtcacagagtagaacattcccattcatagagcagatttgaaacactctttttgtagtatctggaagtggacatttggagcgctttcaggcctatgttgaaaaaggaaatatcttcccataaaaactagacggaagcattctcagaaacttacttgtgatgtgttttctcaactaacagaattgaaccatcgttttgaaggagcagttttgaaacactgttttcgtggaatctgcaagtggatattttgctagctttgaggatttcgttggaaacgggattacatataaaaaggagacaggagcattctcagaaacttctttgtgatgtctgcattcaagtcacagagttgagcattccctttcatagagcaggttggaaacactctttttgtagtatctggatgaggacatttggagcgctttcaggcgtatggtgaaaaaggaaatatcttcccgtaaaaactagacagaagcattctcagaaatttatttgtgatgtgtgccctcaactaaccgagttgaacctttcttttgatagagcagttttgaaacactctttttgtaaaatctgcaagaggatatttggatagctttgaggatttcgttgcaaacgggaatggcttcatataaactctagacagaagcattctcagaaacttcgttgggatgtttcgattgaagtcccagtgttgaacattcccttttatagagcaggttggaaacactctttctgcattccctggaagtggacatttggagcgctttcaggacgacggtgaaaatggaaatatcttccaagaaaatctagatagaagcaacgtcagaaacttttctgtgatggatctactcagctaacagagttgaacctttcttttgagagagcagttttgcaacactctttttgtggaatatgcaagtggatattagggcagctttgaggatttcgttggaaacgggaatacatgtaaaaagcagacagcagcattctcagaaacttctttgtgatgtttgcattgaagtcacagagttgaacattccctttgagagagcaggtttgaaacacgccttttgtcatatctggaagtgtccattcggagcgcattcaggcttgtgttgaaaaaggaaatatcctcccagaaaaactagacagaagcattctcagaaacttatctgtgatgtatgtactcaactaacagaactaaaccatcgttttgaaggagcagttttgaaacactctttttgcggaatctgcaagtggatatttggctagctgggaggatttcgttggaaacgggattacatacaaaaagcagacagcagcattctcagaaacttctttgtgatgtttgcattcaagtcacagagttgaacattccctttcatagagcaggtttgaaacactctttttgtagtatctggatgtggacatttggatggctttcaggcctatggtgaaaaaggaaatatcttcccatgaaaactagacagaagcattctcagaaacttatttgtgatgtgtgccctcaactgacagtgttgaacctttgttttgatagagcagttctgaaacacactttttgtaaaatctgcaagaggatatttggatagctttgaggatttcgttggaaacgggaatgtcttcatgtaaactctagacagaagcattctcagaaactgctttgggatgtttcaattgaagtcccagtgttgaacattcccattcatagagcaggtttgaaacactctttttgtactatctggaagtggacatttggagcgctttcaggtctacggtgaaaaaggagatatcttccaataaaaactagatagaagcaatgtcagaacttttttcatgatgtatctactcagcaaacagagttgaacctttcttttgagagagcagttttgaaacactctttttgtggaatatgcaagtgggtattaggccagcttggaggatttcgttggaaacgggaatacgtataaaaagcagacagcagcattgtcagaaactactttgtgatgtttgcattcaagtcacagaattgaacactccctttcacagagcaggtttgaaacactctttttgtagtgtctgtaagtgaacatttggattgctttcaggcctaaggtgaaaaaggaaatatcttcccataaaaactagacagaagcattctcagaaacttgtttgtgatgtgtgccctctactgacagagttgaacctttctttgcaaagagcagttttgaaacactctttttgtagaatctgcaagaggatatttggatagctttgaagatttcttgggaaacgggaatgtcttcagataaactctagacagaagcattctcagaaacttctttgggatgtttcaattgaagtcacagtgttgaacattccctttcacagagcaggtttgaaacactctttttgtagtgtctataagtgaacatttggcgtgctttcaggcctaacgtgaaaaaggaaatatcttcccataaaaactagacagaagcattctcagaaacttgttcatgatgtgtgccctctactgacagagttgaacctttctttgcaaagagcagctttgaaacactctttttgtagaatctgcaagaggatatttggatagctttgaggatttcgttggaaacgggtatgtcttcagataaactctagacagaagcattctcagaaacttctttgggatgttgcattcaagtcacagagtagaacattcccattcatagagcagatttgaaacactctttttgtagtatctggaagtggacatttggagcgctttcaggcctatgttgaaaaaggaaatatcttcccataaaaactagacggaagcattctcagaaacttacttgtgatgtgtttgctcaactaacagaattgaaccatcgttttaaaggagcagttttgaaacactgttttcgtggaatctgcaagtggatatttggctagctttgaggatttcgttggaaacgggattacatataaaaaggagacagcagcattctcagaaacttctttgtgatgtctgcattcaagtcacagagttgagcattccctttcatagagcaggttggaaacactctttttgtagtatctggatgaggacatttggagcgctttcaggcctatggtgaaaaaggaaatatcttcccgtaaaaactagacagaagcattctcagaaatttatttgtgatgtgtgccctcaactaacagagttgaacctttcttttgatagagcagttttgaaacactctttttgtaaaatctgcaagaggatatttggatagctttgaggatttcgttgcaaacgggaatggcttcatataaactctagacagaagcattctcagaaacttcgttgggatgtttcgattgaagtcccagtgttgaacattcccttttatagagcaggttggaaacactctttctgcattccctggaagtggacatttggagcgctttcaggacgacggtgaaaatggaaatatcttccaagcaaaatctagatagaagcaacgtcagaaacttttatgtgatggatctactcagctaacagagttgaacctttcttttgagagagcagttttgcaacactctttttgtggaatatgcaagtggatattagggcagctttgaggatttcgttggaaacgggaatacatgtaaaaagcagacagcagcattctcagaaacttctttgtgatgtttgcattgaagtcacagagttgaacattccctttgagagagcaggtttgaaacacgccttttgtcatatctggaagtgtccattcggagcgcattcaggcttgtgttgaaaaaggaaatatcctcccataaaaactagacagaagcattctcagaaacttatctgtgatgtatgtactcaacaaacagaactaaaccatcgttttgaaggagcagttttgaaacactctttttgcggaatctgcaagtggatatttggctagctgggaggatttcgttggaaacgggattacatacaaaaagcagacagcagcattctcagaaacttctttgtgatgtttgcattcaagtcacagagttgaacattccctttcatagagcaggtttgaaacactctttttgtagtatctggatgtggacatttggatcgctttcaggcctatggtgaaaaaggaaatatcttcccatgaaaactagacagaagcattctcagaaacttatttgtgatgtgtgccctcaactgacagtgttgaacctttgttttgatagagcagttctgaaacacactttttgtaaaatctgcaagaggatatttggatagctttgaggatttcgttggaaacgggaatgtcatcatgtaaactctagacagaagcattctcagaaactgctttgggatgtttcaattgaagtcccagtgttgaacattccctttcatagagcacgtttgaaacactctttttgtactatctggaagtggacatttggagcgctttcaggtctacggtgaaaaaggagatatcttccaataaaaactagatagaagcaatgtcagaacttttttcatgatgtatctactcagcaaacagagttgaacctttcttttgagagagcagttttgaaacactctttttgtggaatatgcaagtgggtattaggccagcttggaggatttcgttggaaacgggaatacgtataaaaagcagacagcagcattgtcagaaactactttgtgatgtttgcattcaagtcacagaattgaacactccctttcacagagcaggtttgaaacactctttttgtagtgtctgtaagtgtacatttggattgctttcaggcctaaggtgaaaaaggaaatatcttcccataaaaactagacagaagcactctcagaaacttgtttgtgatgtgtgccctctactgacagagttgaacctttctttgcaaagagcagttttgaaacactccttttgtagaatctgcaagaggatatttggatagctttgaggatttcttgggaaacgggaatgtcttcagataaactctagacagaagcattctcagaaacttctttgggatgtttcaattgaagtcacagtgttgaacattccctttcacagagcaggtttgaaacactctttttgtagtgtctataagtgaacatttggcgtgctttcaggtctaacgtgaaaaaggaaatatcttcccataaaaactagacagaagcattctcagaaacttgttcgtgatgtgtgccctctactgacagagttgaacctttctttgcaaagagcagctttgaaacacactttttgtagaatctgcaagaggatatttggatagctttgaggatttcgttggaaacgggtatgtcttcagataaactctagacagaagcattctcagaaatttctttgggatgttgcatgcaagtcacagagtagaacattcccattcatagagcagatttgaaacactctttttgtagtatctggaagtggacatttggagcgctttcaggcctatgttgaaaaaggaaatatcttcccataaaaactagacggaagcattctcagaaacttatttgtgatgtgtttgctcaactaacaggattgaaccatcgttttgaaggagcagttttgaaacactgttttcgtggaatctgcaagtggatatttggctagctgggaggatttcgttggaaacgggattacatataaaaaggagacagcagcattctgagaaacttctttgtgatgtctgcattcaattcacagagttgagcattccctttcatagagcaggtttgaaacactctttttgtagtatctggatgtggacatttggatcgctttcaggcctatggtgaaaaaggaaatatcttcccatgaaaactagacagaagcattctcagaaacttatttgtgatgtgtgccctcaactgacagtgttgaacctttgttttgatagagcagttctgaaacacactttttgtaaaatctgcaagaggatatttggatagctttgaggatttcgttggaaacgggaatgtcttcatgtaaactctacacagaagcattctcagaaactgctttgggacgtttcaattgaagtcccagtgttgaacattcccattcatagagcaggtttgaaacactctttttgtactatctggaagtggacatttggagcgctttcaggtctacggtgaaaaaggagatatcttccaataaaaactagatagaagcaatgtcagaacttttttcatgatgtatctactcagcaaacagagttgaacctttcttttgagggagcagttttgaaacactatttttgtggaatatgcaagtgggtattaggccagcttggaggatttcgttggaaacggtaatacgtataaaaagcagacagcagcattgtcagaaactactttgtgatgtttgcattcaagtcacagaattgaacactccttttcacagagcaggtttgaaacactctttttgtagtgtctgtaagtgaacatttggattgctttcaggcctaaggtgaaaaaggaaatatcttcccataaaaactagacagaagcattctcagaaacttgttcttgatgtgtcccctctactgagagagttgaacctttctttgcaaagagcagctttgaaacactctttttgtagaatctgcaagaggatatttggatagcttggaggatttcgttggaaacgggtatgtcttcagataaactctagacagaagcattctcagaaacttctttgggatgttgcattcaagtcacagagtagaacattcccattcatagagcagatttgaaacactctttttgtagtatctggaagtggacatttggagcgctttcaggcctatgttgaaaaagcaaatatcttcccataaaaactagacggaagcattctcagaaacttatttgtgatgtgtttgctcaactaacaggattgaaccatcgttttgaaggagcagttttgaaacactgttttcgtggaatctgcaagtggatatttggctagctttgaggatttcgttggaaacgggattacatatacaaaggagacagcagcattctcagcaaacttctttgtgatgtctgcattcaattcacagagttgagcattccctttcatagagcaggttggaaacactctttttgtagtatctggatgaggacatttggagcgctttcaggcctatggtgaaaaaggaaatatcttcccgtaaaaactagacagaagcattctcagaagtttatttgtgatgtgtgccctcaactaacagagttgaacctttcttttgatagagcagttttgaaacactctttttgtaaaatctgcaagaggatatttggatagctttgaggatttcgttgcaaacgggaatggcttcatataaactctagacagaagcattctcagaaacttcgttgggatgtttcgattgaagtcccagtgttgaacattcccttttatagagcaggttggaaacactctttctgcattccctggaagtggacatttggagcgctttcaggacaacggtgaaaatggaaatatcttccaagaaaatctagatagaagcaatgtcagaaacttttatgtgatggatctactcagctaacagagttgaacctttcttttgagagagcagttttgcaacactctttttgtggaatatgcaagtggatattagggcagctttgaggatttcgttggaaacgggaatacatgtaaaaagcagacagcagcattctcagaaacttctttgtgatgtttgcattgaagtcacagagttgaacattccctttgagagagcaggtttgaaacacgccttttgtcatatctggaagtgtccattcggagcgcattcaggcttgtgttgaaaaaggaaatatcctcccataaaaactagacagaagcattctcagaaacttatctgtgatgtatgtactcaactaacagaactaaaccatcgttttgaaggagcagttttgaaacactctttttgcggaatctgcaagtggatatttggctagctgggaggatttcgttggaaacgggattacatacaaaaagcagacagcagcattctcagaaacttctttgtgatgtttgcattcaagtcacagagttgaacattccctttcatagagcaggtttgaaacactctttttgtagtatctggatgtggacatttggatcgctttcaggcctatggtgaaaaaggaaatatcttcccatgaaaactagacagaagcattctcagaaacttatttgtgatgtgtgccctcaactgacagtgttgaacctttgttttgatagagcagttctgaaacacactttttgtaaaatctgcaagaggatatttggatagctttgaggatttcgttggaaacgggaatgtcttcatgtaaactctagacagaagcattctcagaaactgctttgggatgtttcaattgaagtcccagtgttgaacattcccattcatagagcaggtttgaaacactctttttgtactatctggaagtggacatttggagcactttcaggtctacggtgaaaaaggagatatcttccaataaaaactagatagaagcaatgtcagaacttttttcatgatgtatctactcagcaaacagagttgaacctttcttttgagagagcagttttgaaacactctttttgtggaatatgcaagtgggtattaggccagcttggaggatttcgttggaaacgggaatacgtataaaaagcagacagcagcattgtcagaaactactttgtgatgtttgcattcaagtcacagaattgaacactccctttcacagagcaggtttgaaacactctttttgtagtgtctgtaagtgaacatttggattgctttcaggcctaaggtgaaaaaggaaatatcttcccataaaaactagacagaagcattctcagaaacttgtttgtgatgtgtgccctctactgacagagttgaacctttctttgcaaagagcagctttgaaacactctttttgtagaatctgcaagaggatatttggatagctttgaggatttcttgggaaacgggaatgtcttcagataaactctagacagaagcattctcagaaacttctttgggatgtttcaattgaagtcacagtgttgaacattccctttcacagagcaggtttgaaacactctttttgtagtgtctataagtgaacatttggcgtgctttcaggcctaacgtgaaaaaggaaatatcttcccataaaaactagacagaagcattctcagaaacttgttcttgatgtgtcccctctactgacagagttgaacctttctttgcaaagagcggctttgaaacactctttttgtagaatctgcaagaggatatttggatagcttggaggttttcgttggaaacgggtatgtcttcagataaactctagacagaagcattctcagaaacttctttgggatgttgcattcaagtcacagagtagaacattcccattcatagagcagatttgaaacactctttttgtagtatctggaagtggacatttggagcgctttcaggcctatgttgaaaaaggaaatatcttcccataaaaactagacggaagcattctcagaaacttacttgtgatgtgtttgctcaactaacagaattgaaccatcgttttgaaggagcagttttgaaacactgttttcgtggaatctgcaagtggatatttggctagctttgaggatttcgttggaaacgggattacatataaaaaggagacagcagcattctcagaaacttctttgtgatgtctgcattcaattcacagagttgagcattccctttcatagagcaggttggaaacactctttttgtagtatctggatgaggacatttggagcgctttcaggcgtatggtgaaaaaggaaatatcttcccgtaaaaactagacagaagcattctcagaaatttatttgtgatgtgtgccctcaactaacagagttgaacctttcttttgatagagcagttttgaaacactctttttgtaaaatctgcaagaggatatttggatagctttgaggatttcgttgcaaacgggaatggcttcatataaactctagacagaagcattctcagaaacttcgtcgggatgtttcgattgaagtcccagtgttgaacattcccttttatagagcaggttggaaacactctttctgcattccctggaagtggacaattggagcgctttcaggacgacggtgaaaatggaaatatcttccaataaaatctggatagaagcaatgtcagaaacttttctgtgatggatctactcagctaacagagttgaacctttcttttgagagagcagttttgcaacactctttttgtggaatatgcaagtggatattagggcagctttgaggatttcgttggaaacgggaatacatgtaaaaagcagacagcagcattctcagaaacttctttgtgatgtttgcattgaagtcacagagttgaacattccctttgagagagcaggtttgaaacacgccttttgtcatatctggaagtgtccattcggagcgcattcaggcttgtgttgaaaaagaaaatatcctcccataaaaactagacagaagcattctcagaaacttatctgtgatgtatgtactcaactaaccgaactaaaccatcgttttgaaggagcagttttgaaacactctttttgcggaatctgcaagtggatatttggctagctgggaggatttcgttggaaacgggattacatacaaaaagcagacagcagcattctcagaaacttctttgtgatgtttgcattcaagtcacagagttgaacattccctttcatagagtaggtttgaaacactctttttgtagtatctggatgtggacatttggatcgctttcaggcctatggtgaaaaaggaaatatcttcccatgaaaactagacagaagcattctcagaaacttgtttgtgatgtgtgccctcaactgacagtgttgaacctttgttttgatagagcagttctgaaacacactttttgtaaaatctgcaagaggatatttggatagctttgaggatttcgttggaaacgggaatgtcttcatgtaaactctacacagaagcattctcagaaactgctttgggatgtttcaattgaagtcccagtgttgaacattcccattcatagagcaggtttgaaacactctttttgtactatctggaagtggacatttggagcgctttcatgtctacggtgaaaaaggagatatcttccaataaaaactagatagaagcaatgtcagaacttttttcatgatgtatctactcagcaaacagagttgaacctttcttttgagagagcagttttgaaacactctttttgtggaatatgaaagtgggtattaggccagcttggaggatttcgttggaaacgggaatacgtataaaaagcagacagcagcattgtcagaaactactttgtgatgtttgcattcaagtcacagaactgaacactccctttcacagagcaggtttgaaacactctttttgtagtgtctgtaagtgaacatttggattgctttcaggcctaaggtgaaaaaggaaatatcttcccataaaaactagacagaagcattctcagaaacttgtttgtgatgtgtgccctctactgacagagttgaacctttctttgcaaagagcagttttgaaacactctttttgtagaatctgcaagaggatatttggatagctttgaggatttcttgggaaacgggaatgtcttcagataaactctagacagaagcattctcagaaacttctttgggatgtttcaattgaagtcacagtgttgaacattccctttcacagagcaggtttgaaacactctttttgtagtgtctataagtgaacatttggcgtgctttcaggcctaacgtgaaaaaggaaatatcttcccataaaaactagacagaagcattctcagaaacttgttcgtgatgtgtgccctctactgacagagttgaacctttctttgcaaagagcagctttgaaacacactttttgtagaatctgcaagaggatatttggatagcttggaggatttcgttggaaacgggtatgtcttcagataaactctagacagaagcattctcagaaacttctttgggatgttgcatgcaagtcacagagtagaacattcccattcatagagcagatttgaaacactctttttgtagtatctggaagtggacatttggagcgctttcaggcctatgttgaaaaaggaaatatcttcccataaaaactagacggaagcattctcagaaacttatttgtgatgtgtttgctcaactaacaggattgaaccttcgttttgaaggagcagttttgaaacactgttttcgtggaatctgcaggtggatatttggctagctttgaggatttcgttggaaacgggattacatataaaaaggagacagcagcattctcagaaacttctttgtgatgtctgcattcaattcacagagttgagcattccctttcatagagcaggttggaaacactctttttgtagtatctggatgtggacatttggatcgctttcaggcctatggtgaaaaaggaaatatcttcccatgaaaactagacagaagcattctcagaatcttatttgtgatgtgtgccctcaactgacagtgttgaacctttgttttgatagagcagttctgaaacacactttttgtaaaatctgcaagaggatatttggatagctttgaggatttcgttggaaacgggaatgtcttcatgtaaactctagacagaagcattctcagaaactgctttgggatgtttcaattgaagtcccagtgttgaacattccctttcatagagcaggtttgaaacactctttttgtactatctggaagtggacatttggagcgctttcaggtctacggtgaaaaaggagatatcttccaataaaaactagatagaagcaatgtcagaacttttttcatgatgtatctactcagctaacagagttgaacctttcttttgagagagcagttttgaaacactctttttgtggaatatgcaagtgggtattaggccagcttggaggatttcgttggaaacgggaatacgtataaaaagcagacagcagcattgtcagaaactactttgtgatgtttgcattcaagtcacagaattgaacactccctttcacagagcaggtttgaaacactctttttgtagtgtctataagtgaacatttggcgtgctttcaggcctaaggtgaaaaaggaaatatcttcccataaaaactagacagaagcattctcagaaacttgttcgtgatgtgtgccctctactgacagagttgaacctttctttgcaaagagcagctttgaaacactctttttgtagaatctgcaagaggatatttggatagctttgaggatttcgttggaaacgggtatgtcttcagataaactctagacagaagcattctcagaaacttctttgggatgttgcattcaagtcacagagtagaacattcccattcatagagcagatttgaaacactctttttgtagtatctggaagtggacatttggagcgctttcaggcctatgttgaaaaaggaaatatcttcccataaaaactagacggaagcattctcagaaacttacttgtgatgtgtttgctcaactaacagaattgaaccatcgttttgaaggagcagttttgaaacactgttttcgtggaatctgcaagtggatatttggctagctttgaggatttcgttggaaacgggattacatataaaaaggagacagcagcattctcagaaacttccttgtgatgtctgcattcaagtcacagagttgagcattccctttcatagagcaggtatgaaacactctttttgtagtatctggatgaggacatttggagcgctttcaggcgtatggtgaaaaaggaaatatcttcccgtaaaaactagacagaagcattctcagaaatttatttgtgatgtgtgccctcaactaacagagttgaacctttcttttgatagagcagttttgaaacactctttttgtaaaatctgcaagaggatatttggatagctttgaggatttcattgcaaacgggaatggcttcatataaactctagacagaagcattctcagaaacttcgttgggatgtttcgattgaagtcccagtgttgaacattcccttttatagagcaggttggaaacactctttctgcattccctggaagtggacatttggagcgctttcaggacgacggtgaaaatggaaatatcttccaagaaaatctagatagaagcaacgtcagaaacttttctgtgatggatctactcagctaacagagttgaacctttcttttgagagagcagttttgcaacactctttttgtggaatatgcaagtggatattagggcagctttgaggatttcgttggaaacgggaatacatgtaaaaagcagacagcagcattctcagaaacttctttgtgatgtttgcattgaagtcacagagttgaacattccctttgagagagcaggtttgaaacacgccttttgtcatatctggaagtgtccattcggagcgcattcaggcttgtgttgaaaaaggaaatatcctcccataaaaactagacagaagcattctcagaaacttatctgtgatgtatgtactcaactaacagaactaaaccatcgttttgaaggagcagttttgaaacactctttttgcggaatctgcaagtggatatttggctagctgggaggatttcgttggaaacgggattacatacaaaaagcagacagcagcattctcagaaacttctttgtgatgtttgcattcaagtcacagagttgaacattccctttcatagagcaggtttgaaacactctttttgtagtatctggatgtggacatttggatcgctttcaggcctatggtgaaaaaggaaatatcttcccatgaaaactagacagaagcattctcagaaacttatttgtgatgtgtgccctcaactgacagtgttgaacctttgttttgatagagcagttctgaaacacactttttgtaaaatctgcaagaggatatttggatagctttgaggatttcgttggaaacgggaatgtcttcatgtaaactctagacagaagcattctcagaaactgctttgggatgtttcaattgaagtcccagtgttgaacattccctttcatagagcaggtttgaaacactctttttgtactatctggaagtggacatttggagcgctttcaggtctacggtgaaaaaggagatatcttccaataaaaactagatagaagcaatgtcagaacttttttcatgatgtatctactcagcaaacagagttgaacctttcttttgagagagcagttttgaaacactctttttgtggaatatgcaagtgggtattaggccagcttggaggatttcgttggaaacgggaatacgtataaaaagcagacagcagcattgtcagaaactactttgtgatgtttgcattcaagtcacagaattgaacactccctttcacagagcaggtttgaaactctctttttgtagtgtctgtaagtgaacatttggattgctttcaggcctaaggtgaaaaaggaaatatcttcccatataaactagacagaagcattctcagaaacttgtttgtgatgtgtgccctctactgacagagttgaacctttcttttcaaagagcagttttgaaacactctttttgtagaatctgcaagaggatatttggatagctttgaggatttcttgggaaacgggaatgtcttcagataaactctagacagaagcattctcagaaacttctttgggatgtttcaattgaagtcacagtgttgaacattccctttcacagagcaggtttgaaacactctttttgtagtgtctataagtgaacatttggcgtgctttcaggcgtaacgtgaaaaaggaaatatcttcccataaaaactagacagaagcattctcagaaacttgttcttgatgtgtcccctctactgacagagttgaacctttctttgcaaagagcagctttgaaacactctttttgtagaatctgcaagaggatatttggatagcttggaggatttcgttggaaacgggtatgtcttcagataaactctagacagaagcattctcagaaacttctttgggatgttgcattcaagtcacagagtagaacattcccattcatagagcagatttgaaacactctttttgtagtatctggaagtggacatttggagcgctttcaggcctatgttgaaaaaggaaatatcttcccataaaaactagacggaagcattctcagaaacttgttcttgatgtgtttgctcaactaacaggattgaaccatcgttttgaaggagcagttttgaaacactgttttcgtggaatctgcaagtggatatttggctagctttgaggatttcgttggaaacgggattacatataaaaaggagacagcagcattctcagaaacttctttgtgatgtctgcattcaattcacagagttgagcattccctttcatagagcaggttggaaacactctttttgtagtatctggatgaggacatttggagcgctttcaggcgtatggtgaaaaaggaaatatcttcccgtaaaaactagacagaagcattctcagaagtttatttgtgatgtgtgccctcaactaacagagttgaacctttcttttgatagagcagttttgaaacactcttttcgtaaaatctgcaagaggatatttggatagctttgaggatttcgttgcaaacgggaatggcttcatataaactctagacagaagcattctcagaaacttcgttgggatgtttcgattgaagtcccagtgttgaacattcccttttatagagcaggttggaaacactctttctgcattccctggaagtggacatttggagcgctttcaggacgacggtgaaaatggaaatatcttccaagaaaatctagatagaagcaatgtcagaaacttttatgtgatggatctactcagctaacagagttgaacctttcttttgagagagcagttttgcaacactctttttgtggaatatgcaagtggatattagggcagctttgaggatttcgttggaaacgggaatacatgtaaaaagcagacagcagcattctcagaaacttctttgtgatgtttgcattgaagtcacagagttgaacattccctttgagagagcaggtttgaaacacgccttttgtcatatctggaagtgtccattcggagcgcattcaggcttgtgttgaaaaaggaaatatcctcccataaaaactagacagaagcattctcagaaacttatctgtgatgtatgtactcaactaacagaactaaaccatcgttttgaaggagcagttttgaaacactctttttgcggaatatgcaagtggatatttggctagcttggaggatttcgttggaaacgggatgacatacaaaaagcagagagcagcattctcagaaacttctttgtgatgtttgcattcaagtcacagagttgaacattccctttcatagagcaggtttgaaacactctttttgtagtatgtggatgtggacatttggatcgctttcaggcctatggtgaaaaaggaaatatcttcccatgaaaactagacagaagcattctcagaaacttatttgtgatgtgtgccctcaactgacagtgttgaacctttgttttgatagagcagttctgaaacacactttttgtaaaatctgcaagaggatatttggatagctttgaggatttcgttggaaacgggaatgtcttcatgtaaactctagacagaagcattctcagaaactgctttgggatgtttcaattgaagtcccactgttgaacattccctttcatagagcaggtttgaaacactctttttgtactatctggaagtggacatttggagcgctttcaggtctacggtgaaaaaggagatatcttccaataaaaactagatagaagcaatgtcagaacttttttcatgatgtatctactcagcaaacagagttgaacctttcttttgagagagcagttttgaaacactctttttgtggaatatgcaagtgggtattaggccagcttggaggatttcgttggaaacgggaatacgtataaaaagcagacagcagcattgtcagaaactactttgtgatgtttgcatgcaagtcacagaatggaacactgcctttcacagagcaggtttgaaacactctttttgtagtgtctgtaagtgaacatttggattgctttcaggcctaaggtgaaaaaggaaatatcttcccataaaaactagacagaagcattctcagaaacttgtttgtgatgtgtgccctctactgacagatttgaacctttctttgcaaagagcagttttgaaacactctttttgtagaatctgcaagaggatatttggatagctttgaggatttcttgggaaacgggaatgtcttcagataaactctagacagaagcattctcagaaacttctttgggatgtttcaattgaagtcacagtgttgaacattccctttcacagagcaggtttgaaacactctttttgtagtgtctataagtgaacatttggcgtgctttcaggcctaacgtgaaaaaggaaatatcttcccataaaaactagacagaagcattctcagaaacttgttcgtgatgtgtgccctctactgacagagttgaacctttctttgaaaagagcagctttgaaacacactttttgtagaatctgcaagaggatatttggatagctttgaggatttcgttggaaacgggtatgtcttcagataaactctagacagaagcattctcagaaacttctgtgggatgttgcattcaagtcacagagtagaacattcccattcatagagcagatttgaaacactctttttgaagtatctggaagtggacatttggagcgctttcaggcctatgttgaaaaaggaaatatcttcccataaaaactagacggaagcattctcagaaacttacttgtgatgtgtttgctcaactaacagaattgaaccatcgttttgaaggagcagttttgaaacactgttttcgtggaatctgcaagtggatatttggctagctttgaggatgtcgttggaaacgggattacatataaaaaggagacagcagcattctcagaaacttctttgtgatgtctgcattcaagtcacagagttgagcattccctttcatagagcaggttggaaacactctttttgtagtatctggatgaggacatttggagcgcttccaggcgtatggtgaaaaaggaaatatcttccgtaaaaactagacagaagcattctcagaaatttatttgtgatgtgtgccctcaactaacagagttgaacctttcttttgatagagcagttttgaaacactctttttgtaaaatctgcaagaggatatttggatagctttgaggatttcgttccaaacgggaatggcttcatataaactctagacagaagcattctcagaaacttcgttgggatgtttcgattgaagtcccagtgttgaacattcccttttatagcgcacgttggaaacactctttttgcattccctggaagtggacatttggagcgctttcaggacgacggtgaaaatggaaatatcttccaataaaatctagatagaagcaacgtcagaaacttttatgtgatggatctactcagctaacagagttgaacctttcttttgagagagcagttttgcaacactctttttgtggaatatgcaagtggatattagggcagctttgaggatttcgttggaaacgggaatacatgtaaaaagcagacagcagcattctcagaaacttctttgtgatgtttgcattgaagtcacagagttgaacattccctttgagagagcaggtttgaaacacgccttttgtcatatctggaagtgtccattcggagcgcattcaggcttgtgttgaaaaaggaaatatcctcccataaaaactagacagaagcattctcagaaacttatctgtgatgtatgtactcaactaacagaactaaaccatcgtcttgaaggagcagttttgaaacactctttttgcggaatctgcaagtggatatttggctagctgggaggatttcgttggacacgggattacatacaaaaagcagagagcagcaatctcagaaacttctttgtgatgtttgcattcaagtcacagagttgaacattccctttcatagagcaggtttgaaacactctttttgtagtatctggatgtggacatttggatcgctttcaggcctatggtgaaaaaggaaatatcttcccatgaaaactagacagaagcattctcagaaacttatttgtgatgtgtgccctcaactgacagtgttgaacctttgttttgatagagcagttctgaaacacactttttgtaaaatctgcaagaggatatttggatagctttgaggatttcgttggaaacgggaatgtcttcatgtaaactctagacagaagcattctcagaaactgctttgggatgtttcaattgaagtcccagtgttgaacattccctttcatagagcaggtttgaaacactctttttgtactatctggaagtggacatttggagcgctttcaggtctacggtgaaaaaggagatatcttccaataaaaactagatagaagcaatgtcagaacttttttcatgatgtatctactcagcaaacagagttgaacctttcttttgagagagcagttttgaaacactctttttgtggaatatgcaagtgggtattaggccagcttggaggatttcgttggaaacgggaatacgtataaaaagcagacagcagcattgtcagaaactactttgtgatgtttgcattcaagtcacagaattgaacactccctttcacagagcaggtttgaaacactctttttgtagtgtctgtaagtgtacatttggattgctttcaggcctaaggtgaaaaaggaaatatcttcccataaaaactagacagaagcattctcagaaacttgtttgtgatgtgtgccctctactgacagagttgaacctttctttgcaaagagcagttttgaaacactctttttgtagaatctgcaagaggatatttggatagctttgaggatttcttgggaaacgggaatgtcttcagataaactctagacagaagcattctcagaaacttctttgggatgtttcaattgaagtcacagtgttgaacattccctttcacagagcaggtttgaaacactctttttgtagtgtctataagtgaacatttggcgtgctttcaggcgtaacgtgaaaaaggaaatatcttcccataaaaactagacagaagcattctcagaaacttgttcgtgatgtgtgccctctactgacagagttgaacctttcttttcaaagagcagctttgaaacacactttttgtagaatctgcaagaggatatttggatagcttggaggatttcgttggaaacgggtatgtcttcagataaactctagacagaagcattctcagaaacttcttcgggatgttgcatgcaagtcacagagtagaacattcccattcatagagcagatttgaaacactctttttgtagtatctggaagtggacatttggagcgctttcaggcctatgttgaaaaaggaaatatcttcccataaaaactagacggaagcattctcagaaacttatttgtgatgtgtttgctcaactaacaggattgaaccatcgttttgaaggagcagttttgaaacactgttttcgtggaatctgcaagtggatatttggctagctttgaggatttcgttggaaacgggattacatataaaaaggagacagcagcattctcagaaacttctttgtgatgtctgcattcaagtcacagagttgagcattccctttcatagagcaggttggaaacactctttttgtagtatctggatgaggacatttggagcgctttcaggcctatggtgaaaaaggaaatatcttcccgtaaaaactagacagaagcattctcagaaatttatttgtgatgtgtgccctcaactaacagagttgaacctttcttttgatagagcagttttgaaacactctttttgtaaaatctgcaagaggatatttggatagctttgaggatttcattgcaaacgggaatggcttcatataaactctagacagaagcattctcagaaacttcgttgggatgtttcgattgaagtcccagtgttgaacattcccttttatagagcaggttggaaacactctttctgcattccctggaagtggacatttggagcgctttcaggacgacggtgaaaatggaaatatcttccaagaaaatctagatagaagcaacgtcagaaacttttctgtgatggatctactcagctaacagagttgaacctttcttttgagagagcagttttgcaacactctttttgtggaatatgcaagtggatattagggcagctttgaggatttcgttggaaacgggaatacatgtaaaaagcagacagcagcattctcagaaacttctttgtgatgtttgcattgaagtcacagagttgaacattccctttgagagagcaggtttgaaacacgccttttgtcatatctggaagtgtccattcggagcgcattcaggcttgtgttgaaaaaggaaatatcctcccagaaaaactagacagaagcattctcagaaacttatctgtgatgtatgtactcaactaacagaactaaaccatcgttttgaaggagcagttttgaaacactctttttgcggaatctgcaagtggatatttggctagctgggaggatttcgttggaaacgggattacatacaaaaagcagacagcagcattctcagaaacttctttgtgatgtttgcattcaagtcacagagttgaacattccctttcatagagcaggtttgaaacactctttttgtagtatctggatgtggacatttggatcgctttcaggcctatggtgaaaaaggaaatatcttcccatgaaaactagacagaagcattctcagaaacttatttgtgatgtgtgccctcaactgacagtgttgaacctttgttttgatagagcagttctgaaacacactttttgtaaaatctgcaagaggatatttggatagctttgaggatttcgttggaaacgggaatgtcttcatgtaaactctagacagaagcattctcagaaactgctttgggatgtttcaattgaagtcccagtgttgaacattccctttcatagagcaggtttgaaacactctttttgtactatctggaagtggacatttggagcgctttcaggtctatggtgaaaaaggagatatcttccaataaaaactagatagaagcaatgtcagaacttttttcatgatgtatctactcagcaaacagagttgaacttttcttttgagagagcagttttgaaacactctttttgtggaatatgcaagtgggtattaggccagcttggaggatttcgttggaaacgggaatacgtataaaaagcagacagcagcattgtcagaaactactttgtgatgtttgcattcaagtcacagaattgaacactccctttcacagagcaggtttgaaacactctttttgtagtgtctgtaagtgaacatttggattgctttcaggcctaaggtgaaaaaggaaatatcttcccataaaaactagacagaagcattctcagaaacttgtttgtgatgtgtgccctctactgacagagttgaacctttctttgcaaagagcagttttgaaacactctttttgtagaatctgcaagaggatatttggatagctttgaggatttcttgggaaacgggaatgtcttcagataaactctagacagaagcattctcagaaacttctttgggatgtttcaattgaagtcacagtgttgaacattccctttcacagagcaggtttgaaacactctttttgtagtgtctataattgaacatttggcgtgctttcaggcctaacgtgaaaaaggaaatatcttcccataaaaactagacagaagcattctcagaaacttgttcgtgatgtgtgccctctactgacagagttgaacctttctttgcaaagagcagctttgaaacactctttttgtagaatctgcaagaggatatgtggatagctttgaggatttcgttggaaacgggtatgtcttcagataaactctagacagaagcattctcagaaacttctttgggatgtttcaattgaagtcacagtgttgaacattccctttcacagagcaggtttgaaacactctttttgtagtgtctataagtgaacatttggcgtgctttcaggcctaacgtgaaaaaggaaatatcttcccataaaaactagacagaagcattctcagaaatttgttcgtgatgtgtgccctctactgacagagttgaacctttctttgcaaagagcagctttgaaacactctgtttgtagaatctgcaagaggatatttggatagctttgaggatttcgttggaaacgggtatgtcttcagataaactctagacagaagcattctcagaaacttctttgggatgttgcattcaagtcacagagtagaacattcccattcatagagcagatttgaaacactctttttgtagtatctggaagtggacatttggagcgctttcaggcctatgttgaaaaaggaaatatcttcccataaaaactagacggaagcattctcagaaacttacttgtgatgtgtttgctcaactaacagaattgaaccatcgttttgaaggagcagttttgaaacactgttttcgtggaatctgcaagtggatatttggctagctttgaggatttcgttggaaacgggattacatataaaaaggagacagcagcattctcagaaacttctttgtgatgtctgcattcaagtcacagagttgagcattccctttcatagagcaggttggaaacactctttttgtagtatctggatgaggacatttggagcgctttcaggcgtatggtgaaaaaggaaatatcttcccgtaaaaactagacagaagcattctcagaaatttatttgtgatgtgtgccctcaactaacagagttgaacctttcttttgatagagcagttttgaaacactctttttgtaaaatctgcaagaggatatttggatagctttgaggatttcgttgcaaacgggaatggcttcatataaactctagacagaagcattctcagaaacttcgttgggatgtttcgattgaagtcccagtgttgaacattcccttttatagagcaggttggaaacactctttctgcattccctggaagtggacatttggagcgctttcaggacgacggtgaaaatggaaatatcttccaagaaaatctagatagaagcaacgtcagaaacttttatgtgatggatctactcagctaacagagttgaacctttcttttgagagagcagttttgcaacactctttttgtggaatatgcaagtggatattagggcagctttgaggatttcgttggaaacgggaatacatgtaaaaagcagacagcagcattctcagaaacttctttgtgatgtttgcattgaagtcacagagttgaacattccctttgagagagcaggtttgaaacacgccttttgtcatatctggaagtgtccattcggagcgcattcaggcttgtgttgaaaaaggaaatatcctcccataaaaactagacagaagcattctcagaaacttatttgtgatgtatgtactcaactaacagaactaaaccatcgttttgaaggagcagttttgaaacactctttttgcggaatctgcaagtggatatttggctagctgggaggatttcgttggaaacgggattacatacaaaaagcagacagcagcattctcagaaacttctttgtgatgtttgcattcaagtcacagagttgaacattccctttcatagagcaggtttgaaacactctttttgtagtatctggatgtggacatttggatcgctttcaagcctatggtgaaaaaggaaatatatcttcccatgaaaactagacagaagcattctcagaaacttatttgtgatgtgtgccctcaactgacagtgttgaacctttgttttgatagagcagttctgaaacacactttttgtaaaatctgcaagaggatatttggatagctttgaggatttcgttggaaacgggaatgtcttcatgtaaactctagacagaagcattctcagaaactgctttgggatgtttcaattgaagtcccagtgttgaacattccctttcatagagcaggtttgaaacactctttttgtactatctggaagtggacatttggagcgctttcaggtctacggtgaaaaaggagatatcttccaataaaaactagatagaagcaatgtcagaacttttttcatgatgtatctactcagcaaacagagttgaacctttcttttgagagagcagttttgaaacactccttttgtggaatatgcaagtgggtattaggccagcttggaggatttcgttggaaacgggtaatacgtataaaaagcagacagcagcattgtcagaaactactttgtgatgtttgcattcaagtcacagaattgaacactccctttcacagagcaggtttgaaacactctttttgtagtgtctgtaagtgaacatttggattgctttcaggcctaaggtgaaaaaggaaatatcttcccataaaaactagacagaagcactctcagaaacttgtttgtgatgtgtgccctctactgacagagttgaacctttctttgcaaagagcagttttgaaacactccttttgtagaatctgcaagaggatatttggatagctttgaggatttcttgggaaacgggaatgtcttcagataaactctagacagaagcattctcagaaacttctttgggatgtttcaattgaagtcacagtgttgaacattccctttcacagagcaggtttgaaacactctttttgtagtgtctataagtgaacatttggcgtgctttcaggcgtaacgtgaaaaaggaaatatcttcccataaaaaccagacagaagcattctcagaaacttgttcgtgatgtgtgccctctactgacagagttgaacctttctttgcaaagagcatctttgaaacactctttttgtagaatctgcaagaggatatttggatagcttggaggatttcgttggaaacgggtatgtcttcagataaactctagacagaagcattctcagaaacttctttgggatgttgcattcaagtcacagagtagaacattcccattcatagagcagatttgaaacactctttttgtagtatctggaagtggacatttggagcgctttcaggcctatgttgaaaaaggaaatatcttcccataaaaactagacggaagcattctcagaaacttacttgtgatgtgtttgctcaactaacagaattgaaccatcgttttgaaggagcagttttgaaacactgttttcgtggaatctgcaagtggatatttggctagctttgaggatttcgttggaaacgggattacatataaaaaggagacagcagcattctcagaaacttctttgtgatgtctgcattcaagtcacagagttgagcattccctttcatagagcaggttggaaacactctttttgtagtatctggatgaggacatttggagcgctttcaggcgtatggtgaaaaaggaaatatcttcccgtaaaaactagacagaagcattctcagaaatttatttgtgatgtgtgccctcaactaacagagttgaacctttcttttgatagagcagttttgaaacactctttttgtaaaatctgcaagaggatatttggatagctttgaggatttcgttgcaaacgggaatggcttcatataaactctagacagaagcattctcagaaacttcgttgggatgtttcgattgaagtcccagtgttgaacattcccttttatagagcaggttggaaacactctttctgcattccctggaagtggacatttggagcgctttcaggacgacggtgaaaatggaaatatcttccaagaaaatctagatagaagcaatgtcagaaacttttatgtgatggatctactcagctaacagagttgaagctttcttttgagagagcagttttgcaacactctttttgtggaatatgcaagtggatattagggcagctttgaggatttcgttggaaacgggaatacatgtaaaaagcagacagcagcattctcagaaacttctttgtgatgtttgcattgaagtcacagagttgaacattccctttgagagagcaggtttgaaacacgccttttgtcatatctggaagtgtccattcggagcgcattcaggcttgtgttgaaaaaggaaatatcctcccataaaaactagacagaagcattctcagaaacttatctgtgatgtatgtactcaactaacagaactaaaccatcgttttgaaggagcagttttgaaacactctttttgcggaatctgcaagtggatatttggctagctgggaggatttcgttggaaacgggattacatacaaaaagcagagagcagcattctcagaaacttctttgtgatgtttgcattcaagtcacagagttgaacattccctttcatagagcaggtttgaaacactctttttgtagtatctggatgtggacatttggatcgctttcaggcctatggtgaaaaaggaaatatcttcccatgaaaactagacagaagcattctcagaaacttatttgtgatgtgtgccctcaactgacagtgttgaacctttgttttgatagagcagttctgaaacacactttttgtaaaatctgcaagaggatatttggatagctttgaggatttcgttggaaacgggaatgtcttcatgtaaactctagacagaagcattctcagaaactgctttgggatgtttcaattgaagtcccagtgttgaacattccctttcatagagcaggtttgaaacactctttttgtactatctggaagtggacatttggagcgctttcaggtctacggtgaaaaaggagatatcttccaataaaaactagatagaagcaatgtcagaacttttttcatgatgtatctactcagcaaacagagttgaacctttcttttgagggagcagttttgaaacactatttttgtggaatatgcaagtgggtattaggccagcttggaggatttcgttggaaacgggaatacgtataaaaagcagacagcagcattgtcagaaactactttgtgatgtttgcattcaagtcacagaattgaacactccctttcacagagcaggtttgaaacactctttttgtagtgtctgtaagtgaacatttggattgctttcaggcctaaggtgaaaaaggaaatatcttcccataaaaactagacagaagcattctcagaaacttgtttgtgatgtgtgccctctactgacagagttgaacctttctttgcaaagagcagttttgaaacactctttttgtagaatctgcaagaggatatttggatagctttgaggatttcttgggaaacgggaatgtcttcagataaactctagacagaagcattctcagaaacttctttgggatgtttcaattgaagtcacagtgttgaacattccctttcacagagcaggtttgaaacactctttttgtagtgtctataagtgaacatttggcgtgctttcaggcctaacgtgaaaaaggaaatatcttcccataaaaactagacagaagcattctcagaaacttgttcgtgatgtgtgccctctactgacagagttgaacctttctttgcaaagagcagctttgaaacacactttttgtagaatctgcaagaggatatttggatagctttgaggatttcgttggaaacgggtatgtcttcagataaactctagacagaagcattctcagaaacttctttgggatgttgcatgcaagtcacagagtagaacattcccattcataaatcagatttgaaacactctttttgtagtatctggaagtggacatttggagcgctttcaggcctatgttgaaaaaggaaatatcttcccataaaaactagacggaagcattctcagaaacttatttgtgatgtgtttgctcaactaacaggattgaaccatcgttttgaaggagcagttttgaaacactgttttcgtggaatctgcaagtggatatttggctagctttgaggattttgttggaaacgggattacatataaaaaggagacagcagcattctgagaaacttctttgtgatgtctgcattcaattcacagagttgagcattccctttcatagagcaggttggaaacactctttttgtagtatctggatgtggacatttggatcgctttcaggcctatggtgaaaaaggaaatatcttcccatgaaaactagacagaagcattctcagaaacttatttgtgatgtgtgccctcaactgacagtgttgaacctttgttttgatagagcagttctgaaacacactttttgtaaaatctgcaagaggatatttggatagctttgaggatttcgttggaaacgggaatgtcttcatgtaaactctagacagaagcattctcagaaactgctttgggatgtttcaattgaagtcccagtgttgaacattcccattcatagagcaggtttgaaacactctttttgtactatctggaagtggacatttggagcgctttcaggtctacggtgaaaaaggagatatcttccaataaaaactagatagaagcaatgtcagaacttttttcatgatgtatctactcagctaacagagttgaacctttcttttgagagagcagttttgaaacactctttttgtggaatatgcaagtgggtattaggccagcttggaggatttcgttggaaacgggaatacgtataaaaagcagacagcagcattgtcagaaactactttgtgatgtttgcattcaagtcacagaattgaacactccctttcacagagcaggtttgaaacactctttttgtagtgtctataagtgaacatttggcgtgctttcaggcctaaggtgaaaaaggaaatatcttcccataaaaactagacagaagcattctcagaaacttgttcgtgatgtgtgccctctactgacagagttgaacctttctttgcaaagagcagctttgaaacactctttttgtagaatctgcaagaggatatttggatagctttgaggatttcgttggaaacgggtatgtcttcagataaactctagacagaagcattctcagaaacttctttgggatgttgcattcaagtcacagagtagaacattcccattcatagagcagatttgaaacactctttttgtagtatctggaagtggacatttggagcgctttcaggcctatgttgaaaaaggaaatatcttcccataaaaactagacggaagcattctcagaaacttacttgtgatgtgtttgctcaactaacagaattgaaccatcgttttgaaggagcagttttgaaacactgttttcgtggaatctgcaagtggatatttggctagctttgaggatttcgttggaaacgggattacatataaaaaggagacagcagcattctcagaaacttctttgtgatgtctgcattcaagtcacagagttgagcattccgtttcatagagcaggttggaaacactctttttgtagtatctggatgaggacatttggagcgctttcaggcctatggtgaaaaaggaaatatcttcccgtaaaaactagacagaagcattctcagaagtttatttgtgatgtgtgccctcaactaacagagttgaacctttcttttgatacagcagttttgaaacactctttttgtaaaatctgctagaggatatttggatagctttgaggatttcgttgcaaacgggaatggcttcatataaactctagacagaagcattctcagaaacttcgttgggatgtttcgattgaagtcccagtgttgaacattcccttttatagagcaggttggaaacactctttctgcattccctggaagtggacatttggagcgctttcaggacgacggtgaaaatggaaatatcttccaagaaaatctagatagaagcaacgtcagaaacttttctgtgatggatctactcagctaacagagttgaacctttcttttgagagagcagttttgcaacactctttttgtggaatatgcaagtggatattagggcagctttgaggatttcgttggaaacgggaatacatgtaaaaagcagacagcagcattctcagaaacttctttgtgatgtttgcattgaagtcacagagttgaacattccctttgagagagcaggtttgaaacacgccttttgtcatatctggaagtgtccattcggagcgcattcaggcttgtgttgaaaaaggaaatatcctcccataaaaactagacagaagcattctcagaaacttatctgtgatgtatgtactcaactaacagaactaaaccatcgttttgaaggagcagttttgaaacactctttttgcggaatctgcaagtggatatttggctagctgggaggatttcgttggaaacgggattacatacaaaaagcagacagcagcattctcagaaacttctttgtgatgtttgcattcaagtcacagagttgaacattccctttcatagagcaggtttgaaacactctttttgtagtatctggatgtggacatttggatcgctttcaggcctatggtgaaaaaggaaatatcttcccatgaaaactagacagaagcattctcagaaacttatttgtgatgtgtgccctcaactgacagtgttgaacctttgttttgatagagcagttctgaaacacactttttgtaaaatctgcaagaggatatttggatagctttgaggatttcgttggaaacgggaatgtcttcatgtaaacttctagacagaagcattctcagaaactgctttgggatgtttcaattgaagtcccagtgttgaacattccctttcatagagcaggtttgaaacactctttttgtactatctggaagtggacatttggagcgctttcaggtctaaggtgaaaaaggagatatcttccaataaaaactagatagaagcaatgtcagaacttttttcatgatgtatctactcagcaaacagagttgaacctttcttttgagagagcagttttgaaacactctttttgtggaatatgcaagtgggtattaggccagcttggaggatttcgttggaaacgggaatacgtataaaaagcagacagcagcattgtcagaaactactttgtgatgtttgcattcaagtcacagaattgaacactccctttcacagagcaggtttgaaacactctttttgtagtgtctgtaagtgaacatatggattgctttcaggcctaaggtgaaaaaggaaatatcttcccataaaaactagacagaagcattctcagaaacttgtttgtgatgtgtgccctctactgacagagttgaacctttctttgcaaagagcagttttgaaacactctttttgtagaatctgcaagaggatatgtggatagctttgaggatttcgttggaaacgggtatgtcttcagataaactctagacagaagcattctcagaaacttctttgggatgtttcaattgaagtcacagtgttgaacattccctttcacagagcaggtttgaaacactctttttgtagtgtctataagtgaacatttggcgtgctttcaggcgtaacgtgaaaaaggaaatatcttcccataaaaaccagacagaagcattctcagaaacttgttcgtgatgtgtgccctctactgacagagttgaacctttctttgcaaagagcagctttgaaacacactttttgtagaatctgcaagaggatatttggatagctttgaggatttcgttggaaacgggtatgtcttcagataaactactagacagaagcattctcagaaacttctttgggatgttgcattcaagtcacagagtagaacattcccattcatagagcagatttgaaacactctttgtgtagtatctggaagtggacatttggagcgctttcaggcctatgttgaaaaaggaaatatcttcccataaaaactagacggaagcattctcagaaacttacttgtgatgtgtttgctcaactaacagaattgaaccatcgttttgaaggagcagttttgaaacactgttttcgtggaatctgcaagtggatatttggctagctttgaggatttcgttggaaacgggattacatataaaaaggagacagccagcattctcagaaacttctttgtgatgtctgcattcaattcacagagttgagcattccctttcatagagcaggttggaaacactctttttgtagtatctggatgaggacatttggagcgctttcaggcgtatggtgaaaaaggaaatatcttcccgtaaaaactagacagagcattctcagaagtttatttgtgatgtgtgccctcaactaacagagttgaacctttcttttgatagagcagttttgaaacactctttttgtaaaatctgcaagaggatatttggatagctttgaggatttcgttgcaaacgggaatggcttcatataaactctagacagaagcattctcagaaacttcgttgggatgtttcgattgaagtcccagtgttgaacattcccttttatagagcaggttggaaacactctttctgcattccctggaagtggacatttggagcgctttcaggacgacggtgaaaatggaaatatcttccaagaaaatctagatagaagcaatgtcagaaacttttatgtgatggatctactcagctaacagagttgaacctttcttttgagagagcagttttgcaacactctttttgtggaatatgcaagtggatattagggcagctttgaggatttcgttggaaacgggaatacatgtaaaaagcagacagcagcattctcagaaacttctttgtgatgtttgcattgaagtcacagagttgaacattccctttgagagagcaggtttgaaacacgccttttgtcatatctggaagtgtccattcggagcgcattcaggcatgtgttgaaaaaggaaatatcctcccataaaaactagacagataagcattctcagaaacttatctgtgatgtatgtactcaactaacaggaactaaaccatcgttttgaaggagcagttttgaaacactctttttgcggaatctgcaagtggatatttggctagctgggaggatttcgttggaaacgggattacatacaaaaagcagagagcagcattctcagaaacttctttgtgatgtttgcattcaagtcacagagttgaacattccctttcatagagcaggtttgaaacactctttttgtagtatctggatgtggacatttggatcgctttcaggcctatggtgaaaaaggaaatatcttcccatgaaaactagacagaagcattctcagaaacttatttgtgatgtgtgccctcaactgacagtgttgaacctttgttttgatagagcagttctgaaacacactttttgtaaaatctgcaagaggatatttggatagctttgaggatttcgttggaaacgggaatgtcttcatgtaaactctacacagaagcattctcagaaactgctttgggatgtttcaattgaagtcccagtgttgaacattcccattcatagagcaggtttgaaacactctttttgtactatctggaagtggacatttggagcgctttcaggtctacggtgaaaaaggagatatcttccaataaaaactagatagaagcaatgtcagaacttttttcatgatgtatctactcagcaaacagagttgaacctttcttttgagagagcagttttgaaacactctttttgtggaatatgcaagtgggtattaggccagcttggaggatttcccttggaaacgggaatacgtataaaaagcagacagcagcattctcagaaacttctttgtgatgtttgcattgaagtcccagatttgaacattccctttcatagagcaggtttgaaacacgccttttgtcatatctggaagttgtccatttggagcgcattccggcttgtgttgaaaaaggaaatatcctcccataaaaactagatagaagcattctcagaaacttatttgtgatgtgagtactcaactaagagagttgaacctttcttttgagagagcagttttgaaacactctttttgtggaatctgcaagtggatatttgtctagctttgaggatttcgttcgaaacgggattacatataaaaagcagacagcagcattcccagaatcttctttgtgatgtttgcattcaagtcacagagttgaacattccctttcatagagcaggtttgaaacactctttttgtagtatctggatgtggacatttggagcgctttcaggcctatggtgaaaaaggatatatcttcccctgaaaactacacagaagcattctcagaaatttatttgtgatgtgtgccctcaactaacagagttgaacctttctttttatagagcagttttgaaacactctttttgtaaaatctgcaagaggatatttggatagctttgaggatttcgttgcaaacgggaatggcttcatataaactctagacagaagcattctcagaaacctcgttgggatgtttcgattgaagtcccagtgttgaacattcccttttatagagcaggttggaaacactctttctgcattccctggaagtggacatttggagcactttcaggacgacggtgaaaatggaaatatcttccaagaaaatctagatagaagcaacgtcagaaacttttctgtgatggatctactcaagctaacagagttgaacctttcttttgagagagcagttttgcaacactctttttgtggaatatgcaagtggatattagggcagctttgaggatttcgttggaaacgggaatacatgtaaaaagcagacagcagcattctcagaaacttctttgtgatgtttgcattgaagtcacagagttgaacattccctttgagagagcaggtttgaaacacgccttttgtcatatctggaagtgtccattcggagcgcattcaggcttgtgttgaaaaaggaaatatcctcccataaaaactagacagaagcattctcagaaacttatctgtgatgtatgtactcaactaacagaactaaaccatcgttttgaaggagcagttttgaaacactctttttgcggaatctgcaagtggatatttggctagctgggaggatttcgttggaaacgggattacatacaaaaagcagacagcagcattctcagaaacttctttgtgatgtttgcattcaagtcacagagttgaacattccctttcatagagcaggtttgaaacactctttttgtagtatctggatgtggacatttggatcgctttcaggcctatggtgaaaaaggaaatatcttcccatgaaaactagacagaagcattctcagaaacttatttgtgatgtgtgccctcaactgacagtgttgaacctttgttttgatagagcagttctgaaacacactttttgtaaaatctgcaagaggatatttggatagctttgaggatttcgttggaaacgggaatgtcttcatgtaaactctagacagaagcattctcagaaactgctttgggatgtttcaattgaagtcccagtgttgaacattccctttcatagagcaggtttgaaacactctttttgtactatctggaagtggacatttggagcgctttcaggtctacggtgaaaaaggagatatcttccaataaaaactagatagaagcaatgtcagaacttttttcatgatgtatctactcagcaaacagagttgaacctttcttttgagagagcagttttgaaacactctttttgtggaatatgcaagtgggtattaggccagcttggaggatttcgttggaaacgggaatacgtataaaaagcagacagcagcattgtcagaaactactttgtgatgtttgcattcaagtcacagaattgaacactccctttcacagagcaggtttgaaacactctttttgtagtgtctgtaagtgaacatttggattgctttcaggcctaaggtgaaaaaggaaatatcttcccataaaaactagacagaagcattctcagaaacttgtttgtgatgtgtgccctctactgacagagttgaacctttctttgcaaagagcagttttgaaacaccctttttgtagaatctgcaagaggatatttggatagctttgaggatttcttgggaaacaggaatgtcttcagataaactctagacagaagcattctcagaaacttctttgggatgtttcagttgaagtcacagtgttgaacattccctttcacagagcaggtttgaaacactctttttgtagtgtctataagtgaacatttggcgtgctttcaggcgtaacgtgaaaaaggaaatatcttcccataaaaactagacagaagcattctcagaaacttgttcgtgatgtgtgccctctactgacagagttgaacctttctttgcaaagagcagctttgaaacacactttttgtagaatctgcatgaggatatttggatagctttgaggatttcgttggaaacgggtatgtcttcagataaactctagacagaagcattctcagaaacttctttgggatgttgcatgcaagtcacagagtagaacattcccattcatagagcagatttgaaacactctttttgtagtatctggaagtggacatttggagcgctttcaggcctatgttgaaaaaggaaatatcttcccataaaaactagacggaagcattctcagaaacttatttgtgatgtgtttgctcaactaacaggattgaaccatccttttgaaggagcagttttgaaacactgttttcgtggaatctgcaagtggatatttggctagctttgaggatttcgttggaaacgggattacatataaaaaggagacagcagcattctcagaaacttctttgtgatttctgcattcaattcacagagttgagcattccctttcatagagcaggttggaaacactctttttgtagtatctggatgtggacatttggatcgctttcaggcctatggtgaaaaaggaaatatcttcctatgaaaactagacagaagcattctcagaaacttatttgtgatgtgtgcactcaactgacagtgttgaacctttgttttgatagagcagttctgaaacacactttttgtaaaatctgcaagaggatatttggatagctttgaggatttcgttggaaacgggaatgtcttcatgtaaactctagacagaagcattctcagaaactgctttgggatgtttcaattgaagtcccagtgttgaacattcccattcatagagcaggtttgaaacactctttttgtactatctggaagtggacatttggagcgctttcaggtctacggtgaaaaaggagatatcttccaataaaaactagatagaagcaatgtcagaacttttttcatgatgtatctactcagcaaacagagttgaacctttcttttgagagagcagttttgacacagtctttgtggaatatgcaagtgggtattaggccagcttggaggatttcgttggaaacgggaatacgtataaaaagcagacagcagcattgtcagaaactactttgtgatgtttgcattcaagtcacagaattgaacactccctttcacagagcaggtttgaaacactctttttgtagtgtctgtaagtgaacatttggattgctttcaggcctatggtgaaaaaggaaatatcttcccataaaaactagacagaagcattctcagaaacttgtttgtgatgtgtgccctctactgacagagttgaacctttctttgcaaagagcagttttgaaacactctttttgtagaatctgcaagaggatatttggatagctttgaggatttcttgggaaacgggaatgtcttcagataaactctagacagaagcattctcagaaacttctttgggatgtttcaattgaagtcacagtgttgaacattccctttcacagagcaggtttgaaacactctttttgtagtgtctataagtgaacatttggcgtgctttcaggcctaacgtgaaaaaggaaatatcttcccataaaaactagacagaagcattctcagaaacttgttcatgatgtgtgccctctactgacagagttgaacctttctttgcaaagagcagctttgaaacactctttttgtagaatctgcaagaggatatttggatagcttggaggatttcgttggaaacgggtatgtcttcagataaactctagacagaagcattctcagaaacttctttgggatgttgcattcaagtcacagagtagaacattcccattcatagagcagatttgaaacactctttttgtagtatctggaagtggacatttggagcgctttcaggcctatgttgaaaaaggaaatatcttcccataaaaactagacggaagcattctcagaaacttacttgtgatgtgtttgctcaactaacagaattgaaccatcgttttgaaggagcagttttgaaacactgttttcgtggaatctgcaagtggatatttggctagctttgaggatttcgttggaaacgggattacatataaaaaggagacagcagcattctcagaaacttctttgtgatgtctgcattcaagtcacagagttgagcattccctttcatagagcaggttggaaacactctttttgtagtatctggatgaggacatttggagcgctttcaggcctatggtgaaaaaggaaatatcttcccgtaaaaactagacagaagcattctcagaaatttatttgtgatgtgtgccctcaactaacagagttgaacctttcttttgatagagcagttttgaaacactctttttgtaaaatctgcaagaggatatttggatagctttgaggatttcgttgcaaacgggaatggcttcatataaactctagacagaagcattctcagaaacttcgttgggatgtttcgattgaagtcccagtgttgaacattcccttttatagagcaggttggaaacactctttctgcattccctggaagtggacatttggagcgctttcaggacgacggtgaaaatggaaatatcttccaagaaaatctagatagaagcaacgtcagaaacttttatgtgatggatctactcagctaacagagttgaacctttcttttgagagagcagttttgcaacactctttttgtggaatatgcaagtggatattagggcagctttgaggatttcgttggaaacgggaatacatgtaaaaagcagacagcagcattctcagaaacttctttgtgatgtttgcattgaagtcacagagttgaacattccctttgagagagcaggtttgaaacacgccttttgtcatatctggaagtgtccattcggagcgcattcaggcttgtgttgaaaaaggaaatatcctcccataaaaactagacagaagcattctcagaaacttatctgtgatgtatgtactcaactaacagaactaaaccatcgttttgaaggagcagttttgaaacactctttttgcggaatctgcaagtggatatttggctagctgggaggatttcgttggaaacgggattacatacaaaaagcagacagcagcattctcagaaacttctttgtgatgttggcattcaagtcacagagttgaacattccctttcatagagcaggtttgaaacactctttttgtagtatctggatgtggacatttggatcgctttcaggcctatggtgaaaaaggaaatatcttcccatgaaaactagacagaagcattctcagaaacttatttgtgatgtgtgccctcaactgacagtgttgaacctttgttttgatagagcagttctgaaacacactttttgtaaaatctgcaagaggatatttggatagctttgaggatttcgttggaaacgggaatgtcttcatgtaaactctacacagaagcattctcagaaactgctttgggatgtttcaattgaagtcccagtgttgaacattcccattcatagagcaggtttgaaacactctttttgtactatctggaagtggacatttggagcgctttcaggtctacggtgaaaaaggagatatcttccaataaaaactagatagaagcaatgtcagaacttttttcatgatgtatctactcagcaaacagagttgaacctttcttttgagagagcagttttgaaacactctttttgtggaatatgcaagtgggtattaggccagcttggaggatttcgttggaaacgggaatacgtataaaaagcagacagcagcattgtcagaaactactttgtgatgtttgcattcaagtcacagaattgaacactccctttcacagagcaggtttgaaacactctttttgtagtgtctgtaagtgaacatttggattgctttcaggcctaaggtgaaaaaggaaatatcttcccataaaaactagacagaagcattctcagaaacttgtttgtgatgtgtgccctctactgacagagttgaacctttctttgcaaagagcagttttgaaacactctttttgtagaatctgcaagaggatatttggatagctttgaggatttcttgggaaacgggaatgtcttcagataaactctagacagaagcattctcagaaacttctttgggatgtttcaattgaagtcacagtgttgaacattccctttcacagagcaggtttgaaacactctttttgtagtgtctataagtgaacatttggcgtgctttcaggcgtaacgtgaaaaaggaaatatcttcccataaaaactagacagaagcattctcagaaacttgttcgtgatgtgtgccctctactgacagagttgaacctttctttgcaaagagcagctttgaaacacactttttgtagaatctgcaagaggatatttggatagctttgaggatttcgttggaaacgggtatgtcttcagataaactctagacagaagcattctcagaaacttctttgggatgttgcatgcaagtcacagagtagaacattcccattcatagagcagatttgaaacactctttttgtagtatctggaagtggacatttggagcgctttcaggcctatgttgaaaaaggaaatatcttcccataaaaactagacggaagcattctcagaaacttatttgtgatgtgtttgctcaactaacaggattgaaccatcgttttgaaggagcagttttgaaacactgttttcgtggaatctgcaagtggatatttggctagctgggaggatttcgttggaaacgggattacatataaaaaggagacagcagcattctgagaaacttctttgtgatgtctgcattcaattcacagagttgagcattccctttcatagagcaggtttgaaacactctttttgtagtatctggatgtggacatttggatcgctttcaggcctatggtgaaaaaggaaatatcttcccatgaaaactagacagaagcattctcagaaacttatttgtgatgtgtgccctcaactgacagtgttgaacctttgttttgatagagcagttctgaaacacactttttgtaaaatctgcaagaggatatttggatagctttgaggatttcgttggaaacgggaatgtcttcatgtaaactctagacagaagcattctcagaaactgctttgggatgtttcaattgaagtcccagtgttgaacattccctttcatagagcaggtttgaaacactctttttgtactatctggaagtggacatttggagcgctttcaggtctacggtgaaaaaggagatatcttccaataaaaactagatagaagcaatgtcagaacttttttcatgatgtatctactcagcaaacagagttgaacctttcttttgagagagcagttttgaaacactccttttgtggaatatgcaagtgggtattaggccagcttggaggatttcgttggaaacgggaatacgtataaaaagcagacagcagcattgtcagaaactactttgtgatgtttgcattcaagtcacagaattgaacacaccctttcacagagcaggtttgaaacactctttttgtagtgtctgtaagtgaacatttggattgatttcaggcctaaggtgaaaaaggaaatatcttcccataaaaactagacagaagcattctcagaaacttgtttgtgatgtgtgccctctactgacagagttgaacctttctttgcaaagagcagttttgaaacactctttttgtagaatctgcaagaggatacttggatagctttgaggatttcttgggaaacgggaatgtcttcagataaactctagacagaagcattctcagaaacttctttgggatgtttcaattgaagtcacagtgttgaacattccctttcacagagcaggtttgaaacactctttttgtagtgtctataagtgaacatttggcgtgctttcaggcgtaacgtgaaaaaggaaatatcttcccataaaaactagacagaagcattctcagaaacttgttcgtgatgtgtgccctctactgacagagttgaacctttctttgcaaagagcagctttgaaacacactttttgtagaatctgcaagaggatatttggatagttttgaggatttcgttggaaacgggtatgtcttcagataaactctagacagaagcattctcagaaacttctttgggatgttgcattcaagtcacagagtagaacattcccattcatagagcagatttgaaacactctttttgtagtatctggaagtggacatttggagcgctttcaggcctatgttgaaaaaggaaatatcttcccataaaaactagacggaagcattctcagaaacttacttgtgatgtgtttgctcaactaacagaattgaaccatcgtttggaaggagcagttttgaaacactgttttcgtggaatctgcaagtggatatttggctagctttgaggatttcgttggaaacgggattacatataaaaaggagacagcagcattctcagaaacttctttgtgatgtctgcattcaagtcacagagttgagcattccctttcatagagcaggttggaaacactctttttgtagtatctggatgaggacatttggagcgctttcaggcgtatggtgaaaaaggaaatatcttcccgtaaaaactagacagaagcattctcagaaatttatttgtgatgtgtgccctcaactaacagagttgaacctttcttttgatagagcagttttgaaacactctttttgtaaaatctgcaagaggatatttggatagcttggaggatttcattgcaaacgggaatggcttcatataaactctagacagaagcattctcagaaacttcgttgggatgtttcgattgaagtcccagtgttgaacattcccttttatagagcaggttggaaacactctttctgcattccctggaagtggacatttggagcgctttcaggacgacggtgaaaatggaaatatcttccaagaaaatctagatagaagcaatgtcagaaacttttatgtgatggatctactcagctaacagagttgaagctttcttttgagagagcagttttgcaacactctttttgtggaatatgcaagtggatattagggcagctttgaggatttcgttggaaacgggaatacatgtaaaaagcagacagcagcattctcagaaacttctttgtgatgtttgcattgaagtcacagagttgaacattccctttgagagagcaggtttgaaacacgccttttgtcatatctggaagtgtccattcggagcgcattcaggcttgtgttgaaaaaggaaatatcctcccagaaaaactagacagaagcattctcagaaacttatctgtgatgtatgtactcaactaacagaactaaaaaatcgttttgaaggagcagttttgaagcactctttttgcggaatctgcaagtggatatttggctagctgggaggatttcgttggaaacgggattacatacaaaaagcagacagcagcattctcagaaacttctttgtgatgtttgcattcaagtcacagagttgaacattccctttcatagagcaggtttgaaacactctttttgtagtatctggatgtggacatttggatcgctttcaggcctatggtgaaaaaggaaatatcttcccatgaaaactagacagaagcattctcagaaacttatttgtgatgtgtgccctcaactgacagtgttgaacctttgttttgatagagcagttctgaaacacactttttgtaaaatctgcaagaggatatttggatagctttgaggatttcgttggaaacgggaatgtcttcatgtaaacttctagacagaagcattctcagaaactgctttgggatgtttcaattgaagtcccagtgttgaacattccctttcatagagcaggtttgaaacactctttttgtactatctggaagtggacatttggagcgctttcaggtctaaggtgaaaaaggagatatcttccaataaaaactagatagaagcaatgtcagaacttttttcatgatgtatctactcagctaacagagttgaacctttcttttgagagagcagttttgaaacactctttttgtggaatatgcaagtgggtattaggccagcttggaggatttcgttggaaacgggaatacgtataaaaagcagacagcagcattgtcagaaactactttgtgatgtttgcattcaagtcacagaattgaacactccctttcacagagcaggtttgaaacactctttttgtagtgtctgtaagtgaacatttggattgctttcaggcctaaggtgaaaaaggaaatatcttcccataaaaactagacagaagcattctcagaaacttgtttgtgatgtgtgccctctactgacagagttgaacctttctttgcaaagagcagttttgaaacactctttttgtagaatctgcaagaggatatttggatagctttgaggatttcttgggaaacgggaatgtcttcagataaactctagacagaagcattctcagaaacttctttgggatgtttcaattgaagtcacagtgttgaacattccctttcacagagcaggtttgaaacactctttttgtagtgtctataagtgaacatttggcgtgctttcaggcctaacgtgaaaaaggaaatatcttcccataaaaactagcacagaagcattctcagaaacttgttcgtgatgtgtgccctctactgacagagttgaacctttctttgcaaagagcagctttgaaacactctttttgtagaatctgccagaggatatttggatagctttgaggatttcgttggaaacgggtatgtcttcagataaactctagacagaagcattctcagaaacttctttgggatgttgcattcaagtcacagagtagaacattcccattcatagagcagatttgaaacactctttttgtagtatctggaagtggacatttggagcgctttcaggcctatgttgaaaaaggaaatatcttcccataaaaactagacggaagcattctcagaaacttacttgtgatgtgtttgctcaacttacagaattgaaccatcgttttgaaggagcagttttgaaacactgttttcgtggaatctgcaagtggatatttggctagctttgaggatttcgttggaaacgggattacatataaaaaggagacagcaacattctcagaaacttctttgtgatgtctgcattcaagtcacagagttgagcattccctttcatagagcaggttggaaacactctttttgtagtatctggatgaggacatttggagcgctttcaggcgtatggtgaaaaaggaaatatcttcccgtaaaaactagacagaagcattctcagaaatttatttgtgatgtgtgccctcaactaacagagttgaacctttcttttgatagagcagttttgaaacactctttttgtaaaatctgcaagaggatatttggatagctttgaggatttcgttgcaaacgggaatggcttcatataaactctagacagaagcattctcagaaacttcgttgggatgtttcgattgaactcccagtgttgaacattcccttttatagagcaggttggaaacactctttctgcattccctggaagtggacaattggagcgctttcaggacgacggtgaaaatggaaatatcttccaataaaatctggatagaagcaatgtcagaaacttttctgtgatggatctactcagctaacagagttgaacctttcttttgagagagcagttttgcaacactctttttgtggaatatgcaagtggatattaaggcagctttgaggatttcgttggaaacgggaatacatgtaaaaagcagacagcagcattctcagaaacttctttgtgatgtttgcattgaagtcacagagttgaacattccctttgagagagcaggtttgaaacacgccttttgtcatatctggaagtgtccattcggagcgcattcaggcttgtgttgaaaaaggaaatatcctcccataaaaactagacagaagcattctcagaaacttatctgtgatgtatgtactcaactaacagaactaaaccatcgttttgaaggagcagttttgaaacactctttttgcggaatctgcaagtggatatttggctagctgggaggatttcgttggaaacgggattacatacaaaaagcagacagcagcattctcagaaacttctttgtgatgtttgcattcaagtcacagagttgaacattccctttcatagagcaggtttgaaacactctttttgtagtatctggatgtggacatttggatcgctttcaggcctatggtgaaaaaggaaatatcttcccatgaaaactagacagaagcattctcagaaacttatttgtgatgtgtgccctcaactgacagtgttgaacctttgttttgatagagcagttctgaaacacactttttgtaaaatctgcaagaggatatttggatagctttgaggagttcgttggaaacgggaatgtcttcatgtaaactctagacagaagcattctcagaaactgctttgggatgtttcaattgaagtcccagtgttgaacattccctttcatagagcaggtttgaaacactctttttgtactatctggaagtggacatttggagcgctttcaggtctacggtgaaaaaggagatatcttccaataaaaactagatagaagcaatgtcagaacttttttcatgatgtatctactcagcaaacagagttgaacctttcttttgagagagcagttttgaaacactctttttgtggaatatgcaagtgggtattaggccagcttggaggatttcgttggaaacgggaatacgtataaaaagcagacagcagcattgtcagaaactactttgtgatgtttgcattcaagtcacagaattgaacactccctttcacagagcaggtttgaaacactctttttgtagtgtctgtaagtgaacatttggattgctttcaggcctaaggtgaaaaaggaaatatcttcccataaaaactagatagaagcattctcagtaaacttgtttgtgatgtgtgccctctactgacagagttgaacctttctttgcaaagagcagttttgaaacactctttttgtagaatctgcaagaggatatttggatagctctgaggatttcttgggaaacgggaatgtcttcagataaactctagacagaagcattctcagaaacttctttgggatgttgcattcaagtcacagagtagaacattcccattcatagagcagatttgaaacactctttttgtagtatctggaagtggacatttggagcgctttcaggcctatgttgaaaaaggaaatatcttcccataaaaactagacggaagcattctcagaaacttaattgtgatgtgtttgctcaactaacaggattgaaccatcgttttgaaggagcagttttgaaacactgttttcgtggaatctgcaagtggatatttggctagctttgaggatttcgttggaaacgggattacatataaaaaggagacagcagcattctcagaaacttctttgtgatgtctgcattcaattcacagagttgagcattccctttcatagagcaggttggaaacactctttttgtagtatctggatgtggacatttggatcgctttcaggcctatggtgaaaaaggaaatatcttcccatgaaaactagacagaagcattctcagaaacttatttgtgatgtgtgcactcaactgacagtgttgaacctttgttttgatagagcagttctgaaacacactttttgtaaaatctgcaagaggatatttggatagctttgacgatttcgttggaaacgggaatgtcttcatgtaaactctagacagaagcattctcagaaactgctttgggatgtttcaattgaagtcccagtgttgaacattccctttcatagagcaggtttgaaacactctttttgtactatctggaagtggacatttggagcgctttcaggtctacggtgaaaaaggagatatcttccaataaaaactagatagaagcaatgtcagaacttttttcatgatgtatctactcagcaaacagagttgaacctttcttttgagagagcagttttgaaacactctttttgtggaatatgcaagtgggtattaggccagcttggaggatttcgttggaaacgggaatacgtataaaaagcagacagcagcattgtcagaaactactttgtgatgtttgcattcaagtcacagaattgaacactccctttcacagagcaggtttgaaacactctttttgtagtgtctgtaagtgaacatttggattgctttcaggcctaaggtgaaaaaggaaatatcttcccataaaaactagacagaagcattctcagaaacttgtttgtgatgtgtgccctctactgacagagttgaacctttctttgcaaagagcagttttgaaacactctttttgtagaatctgcaagaggatatttggatagctttgaggatttcttgggaaacgggaatgtcttcagataaactctagacagaagcattctcagaaacttctttgggatgtttcaattgaagtcacagtgttgaacattccctttcacagagcaggtttgaaacactctttttgtagtatctataagtgaacatttggcgtgctttcaggcgtaacgtgaaaaaggaaatatcttcccataaaaactagacagaagcattctcagaaacttgttcttgatgtgtgccctctactgacagagttgaacctttctttgcaaagagcagctttgaaacactctttttgtagaatctgcaagaggatatttggatagcttggaggatttcgttggaaacgggtatgtcttcagataaactctagacagaagcattctcagaaacttctttgggatgttgcattcaagtcacagagtagaacattcccattcatagagcagatttgaaacactctttttgtagtatctggaagtggacatttggagcgctttcaggcctatgttgaaaaaggaaatatcttcccataaaaactagacggaagcattctcagaaacttaattgtgatgtgtttgctcaactaacaggattgaaccatcgttttgaaggagcagttttgaaacactgttttcgtggaatctgcaagtggatatttggctagctgggaggatttcgttggaaacgggattacatataaaaaggagacagcagcattctcagaaacttctttgtgatgtctgcattcaattcacagagttgagcattccctttcatagagcaggttggaaacactctttttgtagtatctggatgaggacatttggagcgctttcaggcgtatggtgaaaaaggaaatatcttcccgtaaaaactagacagaagcattctcagaagtttatttgtgatgtgtgccctcaactaacagagtttaacctttcttttgatagagcagttttgaaacactctttttgtaaaatctgcaagaggatatttggatagctttgaggatttcgttgcaaacgggaatggcttcatataaactctagacagaaagcattctcagaaacttcgttgggatgtttcgattgaagtcccagtgttgaacattcccttttatagagcaggttggaaacactctttctgcattccctggaagtggacatttggagcgctttcaggacgacggtgaaaatggaaatatcttccaagaaaatctagatagagcaacgtcagaaacttttctgtgatggatctactcagctaacagagttgaacctttcttttgagagagcagttttgcaacactctttttgtggaatatgcaagtggatattagggcagctttgaggatttcgttggaaacgggaatacatgtaaaaagcagacagcagcattctcagaaacttctttgtgatatttgcattgaagtcacagagttgaacattccctttgagagagcaggtttgaaacacgccttttgtcatatctggaagtgtccattcggagcgcattcaggcttgtgttgaaaaaggaaatatcctcccataaaaactagacagaagcattctcagaaacttatctgtgatgtatgtactcaactaacagaactaaaccatcgttttgaaggagcagttttgaaacactctttttgcggaatctgcaagtggatatttggctagctgggaggatttcgttggaaacgggattacatacaaaaagcagacagcagcattctcagaaacttctttgtgatgtttgcattcaagtcacagagttgaacattccctttcatagagcaggtttgaaacactctttttgtagtatctggatgtggacatttggatcgctttcaggcctatggtgaaaaaggaaatatcttcccatgaaaactagacagaagcattctcagaaacttatttgtgatgtgtgccctcaactgacagtgttgaacctttgttttgatagagcagttctgaaacacactttttgtaaaatctgcaagaggatatttggatagctttgaggatttcgttggaaacgggaatgtcttcatgtaaactctagacagaagcattctcagaaactgctttgggatgtttcaattgaagtcccagtgttgaacattccctttcatagagcaggtttgaaacactctttttgtactatctggaagtggacatttggagcgctttcaggtctacggtgaaaaaggagatatcttccaataaaaactagatagaagcaatgtcagaacttttttcatgatgtatctactcagcaaacagagttgaacctttcttttgagagagcagttttgaaacactctttttgtggaatatgcaagtgggtattaggccagcttgaaggatttcgttggaaacgggattacgtataaaaagcagacagcagcattgtcagaaactactttgtgatgtttgcattcaagtcacagaattgaacactccctttcacagagcaggtttgaaacactctttttgtagtgtctgtaagtgaacatttggattgctttcaggcctaaggtgaaaaaggaaatatcttcccataaaaactagacagaagcattctcagaaacttgtttgtgatgtgtgccctctactgacagagttgaacctttctttgcaaagagcagttttgaaacactctttttgtagaatctgcaagaggatatttggatagctttgaggatttcttgggaaacgggaatgtcttcagataaactctagacagaagcattctcagaaacttctttgggatgtttcaattgaagtcacagtgttgaacattccctttcacagagcaggtttgaaacactctttttgtagtgtctgtaagtgaacatttggcgtgctttcaggcctaacgtgaaaaaggaaatatcttcccataaaaactagacagaagcattctcagaaacttgttcgtgatgtgtgccctctactgacagagttgaacctttctttgcaaagagcagctttgaaacactctttttgtagaatctgcaagaggatatttggatagctttgaggatttcgttggaaacgggtatgtcttcagataaactctagacagaagcattctcagaaacttctttgggatgtttcaattgaagtcacagtgttgaacattccctttcacagagcaggtttgaaacactctttttgtagtgtctataagtgaacatttggcgtgctttcaggcctaacgtgaaaaaggaaatatcttcccataaaaactagacagaagcattctcagaaacttgttcgtgatgtgtgccctctactgacagagttgaacctttctttgcaaagagcagctttgaaacactctttctgtagaatctgcaagaggatatttggatagcttggaggatttcgttggaaacgggtatgtcttcagataaactctagacagaagcattctcagaaacttctttgggatgttgcattcaagtcacagagtagaacattcccattcatagagcagatttgaaacactctttttgtagtatctggaagtggacatttggagcgctttcaggcctatgttgaaaaaggaaatatcttcccataaaaactagacggaagcattctcagaaacttacttgtgatgtgtttgctcaactaacagaattgaaccatcgttttgaaggagcagttttgaaacactgttttcgtggaatctgcaagtggatatttggctagctttgaggatttcgttggaaacgggattacatatacaaaggagacagcagcattctcagaaacttctttgtgatgtctgcattcaagtcacagagttgagcattccctttcatagagcaggttggaaacactctttttgtagtatctggatgaggacatttggagcgctttcaggcgtatggtgaaaaaggaaatatcttcccgtaaaaactagacagaagcattctcagaaatttatttgtgatgtgtgccctcaactaacagagttgaacctttcttttgatagagcagttttgaaacactctttttgtaaaatctgcaagaggatatttggatagctttgaggatttcgttgcaaacgggaatggcttcatataaactctagacagaagcattctcagaaacttcgttgggatgtttcgattgaagtcccagtgttgaacattcccttttatagagcaggttggaaacactctttctgcattccctggaagtggacatttggagcgctttcaggacgacggtgaaaatggaaatatcttccaagaaaatctagatagaagcaacgtcagaaacttttctgtgatggatctactcagctaacagagttgaacctttcttttgagagagcagttttgcaacactctttttgtggaatatgcaagtggatattagggcagctttgaggatttcgttggaaacgggaatacatgtaaaaagcagacagcagcattctcagaaacttctttgtgatgtttgcattgaagtcacagagttgaacattccctttgagagagcaggtttgaaacacgccttttgtcatatctggaagtgtccattcggagcgcattcaggcttgtgttgaaaaaggaaatatcctcccataaaaactagacagaagcattctcagaaacttatctgtgatgtatgtactcaactaacagaactaaaccatccttttgaaggagcagttttgaaacactctttttgcggaatctgcaagtggatatttggctagctgggaggatttcgttggaaacgggattacatacaaaaaggagacagcagcattctcagaaacttctttgtgatgtttgcattcaagtcacagagttgaacattccctttcatagagcaggtttgaaacactctttttgtagtatctggatgtggacatttggatcgctttcaggcctatggtgaaaaaggaaatatcttcccatgaaaactagacagaagcattctcagaaacttatttgtgatgtgtgccctcaactgacagtgttgaacctttgttttgatagagcagttctgaaacacactttttgtaaaatctgcaagaggatatttggatagctttgaggatttcgttggaaacgggaatgtcttcatgtaaactctacacagaagcattctcagaaactgctttgggatgtttcaattgaagtcccagtgttgaacattcccattcatagagcaggtttgaagcactctttttgtactatctggaagtggacatttggagcgctttcaggtctacggtgaaaaaggagatatcttccaataaaaactagatagaagcaatgtcagaacttttttcatgatgtatctactcagcaaacagagttgaacctttcttttgagagagcagttttgaaacactctttttgtggaatatgcaagtgggtattaggccagcttggaggatttcgttggaaacgggaatacgcataaaaagcagacagcagcattgtcagaaactactttgtgatgtttgcattcaagtcacagaattgaacactccctttcacagagcaggtttgaaatactctttttgtagtgtctgtaagtgaacatttggattgctttcatgcctaaggtgaaaaaggaaatatcttcccataaaaactagacagaagcattctcagaaacttgtttgtgatgtgtgccctctactgacagagttgaacctttctttgcaaagagcagttttgaaacactctttttgtagaatctgcaagaggatatttggatagctttgaggatttcttgggaaacgggaatgtcttcagataaactctagacagaagcattctcagaaacttcttgggatatttcaattgaagtcacagtgttgaacattccctttcacagagcaggtttgaaacactctttttgtagtgtctataagtgaacatttggcgtgctttcaggcctaacgtgaaaaaggaaatatcttcccataaaaactagacagaagcattctcagaaacttgttcgtgatgtgtgccctctactgacagagttgaacctttctttgcaaagagcagctttgaaacactctttttgtagaatctgcaagaggatatttggatagctttgaggatttcgttggaaacgggtatgtcttcagataaactctagacagaaacattctcagaaacttctttgggatgttgcattcaagtcacagagtagaacattcccatgcatagagcagatttgaaacactctttttgtagtatctggaagtggacatttggagcgctttcaggcctatgttgaaaaaggaaatatcttcccataaaaactagatggaagcattctcagaaacttacttgtgatgtgtttgctcaactaacaggattgaaccatcgttttgaaggagcagttttgaaacactgttttcgtggaatctgcaagtggatatttggctagctttgaggatttcgttggaaacgggattacatatacaaaggagacagcagcattctcagaaacttctttgtgatgtctgcattcaattcacagaattgagcattccctttcatagagcaggttggaaacactctttttgtagtatctggatgaggacatttggagcgctttcaggcgtatggtgaaaaaggaaatatcttcccgtaaaaactagacagaagcattctcagaaatttatttgtgatgtgtgccctcaactaacagagttgaacctttcttttgatagagcagttctgaaacactctttttgtaaaatctgcaagaggatatttggatagctttgaggatttcgttgcaaacgggaatggcttcatataaactctagacagaagcattctcagaaacttcgttgggatgtttcgattgaagtcccagtgttgaacattcccttttatagagcaggttggaaacactctttctgcattccctggaagtggacatttggagcgctttcaggacgacggtgaaaatggaaatatcttccaagaaaatctagatagaagcaatgtcagaaacttttatgtgatggatctactcagctaacagagttgaacctttcttttgagagagcagttttgcaacactctttttgtggaatatgcaagtggatattagggcagctttgaggatttcgttggaaacgggaatacatgtaaaaagcagacagcagcattctcagaaacttctttgtgatgtttgcattgaagtcacagagttgaacattccctttgagagagcaggtttgaaacacgccttttgtcatatctggaagtgtccattcggagcgcattcaggcttgtgttgaaaaaggaaatatcctcccataaaaactagacagaagcattctcagaaacttatctgtgatgtatgtactcaactaacagaactaaaccatcgttttgaaggagcagttttgaaacactctttttgcggaatctgcaagtggatatttggctagctgggaggatttcgttggaaacgggattacatacaaaaagcagacagcagcattctcagaaacttctttgtgatgtttgcattcaagtcacagagttgaacattccctttcatagagcaggtttgaaacactctttttgtagtatctggatgtggacatttggatcgctttcaggcctatggtgaaaaaggaaatatcttcccatgaaaactagacagaagcattctcagaaacttatttgtgatgtgtgccctcaactgacagtgttgaacctttgttttgatagagcagttctgaaacacactttttgtaaaatctgcaagaggatatttggatagctttgaggatttcgttggaaacgggaatgtcttcatgtaaactctagacagaagcattctcagaaactgctttgggatgtttcaattgaagtcccagtgttgaacattccctttcatagagcaggtttgaaacactctttttgtactatctggaagtggacatttggagcgctttcaggtctacggtgaaaaaggagatatcttccaataaaaactagatagaagcaatgtcagaacttttttcatgatgtatctactcagcaaacagagttgaacctttcttttgagagagcagttttgaaacactctttttgtggaatatgcaagtgggtattaggccagcttggaggatttcgttggaaacgggaatacgtataaaaagcagacagcagcattgtcagaaactactttgtgatgtttgcattcaagtcacagaattgaacactccctttcacagagcaggtttgaaacactctttttgtagtgtctgtaagtgaacatttggattgctttcaggcctaaggtgaaaaaggaaatatcttcccataaaaactagacagaagcattctcagaaacttgtttgtgatgtgtgccctctactgacagagttgaacctttctttgcaaagagcagttttgaaacactctttttgtagaatctgcaagaggatatttggatagctttgaggatttcttgggaaacgggaatgtcttcagataaactctagacagaagcattctcagaaacttctttgggatgtttcaattgaagtcacagtgttgaacattccctttcacagagcaggtttgaaacactctttttgtagtgtctataagtgaacatttggcgtgctttcaggcctaacgtgaaaaaggaaatatcttcccataaaaactagacagaagcattctcagaaacttgttcgtgatgtgtgccctctactgacagagttgaacctttctttgcaaagagcagctttgaaacacactttttgtagaatctgcaagaggatatttggatagcttggaggatttcgttggaaacgggtatgtcttcagataaactctagacagaagcattctcagaaacttctttgggatgttgcattcaagtcacagagtagaacattcccattcatagagcagatttgaaacactctttttgtagtatctggaagtggacatttggagcgctttcaggcctatgttgaaaaaggaaatgtcttcccataaaaactagacggaagcattctcagaaacttatttgtgatgtgtttgctcaactaacaggattgaaccatcgttttgaaggagcagttttgaaacactgttttcgtggaatctgcaagtggatatttggctagctttgaggatttcgttggaaacgggattacatatacaaaggagacagcagcattctcagaaacttctttgtgatgtctgcattcaattcacagagttgagcattccctttcatagagcaggttggaaacactctttttgtagtatctggatgaggacatttggagcgctttcaggcgtatggtgaaaaaggaaatatcttcccgtaaaaactagacagaagcattctcagaaatttatttgtgatgtgtgccctcaactaacagagttgaacctttcttttgatagagcagttttgaaacactctttttgtaaaatctgcaagaggatatttggatagctttgaggatttcgttgcaaacgggaatggcttcatataaactctagacagaagcattctcagaaacttcgttgggatgtttcgattgaagtcccagtgttgaacattcccttttatagagcaggttggaaacactctttctgcattccctggaagtggacatttggagcgctttcaggacgacggtgaaaatggaaatatcttccaagaaaatctagatagaagcaacgtcagaaacttttatgtgatggatctactcagctaacagagttgaacctttcttttgagagagcagttttgcaacactctttttgtggaatatgcaagtggatattagggcagctttgaggatttcgttggaaacgggaatacatgtaaaaagcagacagcagcattctcagaaacttctttgtgatgtttgcattgaagtcacagagttgaacattccctttgagagagcaggtttgaaacacgccttttgtcatatctggaagtgtccattcggagcgcattcaggcttgtgttgaaaaaggaaatatcctcccataaaaactagacagaagcattctcagaaacttatctgtgatgtatgtactcaactaacagaactaaaccatcgttttgaaggagcagttttgaaacactctttttgcggaatctgcaagtggatatttggctagctgggaggatttcgttggaaacgggattacatacaaaaagcagacagcagcattctcagaaacttctttgtgatgtttgcattcaagtcacagagttgaacattccctttcatagagcaggtttgaaacactctttttgtagtatctggatgtggacatttggatcgctttcaggcctatggtgaaaaaggaaatatcttcccatgaaaactagacagaagcattctcagaaacttatttgtgatgtgtgccctcaactgacagtgttgaacctttgttttgatagagcagttctgaaacacactttttgtaaaatctgcaagaggatatttggatagctttgaggatttcgttggaaacgggaatgtcttcatgtaaactctacacagaagcattctcagaaactgctttgggatgtttcaattgaagtcccagtgttgaacattccctttcataggagcaggtttgaaacactctttttgtactatctggaagtggacatttggagcgctttcaggtctacggtgaaaaaggagatatcttccaataaaaactagatagaagcaatgtcagaacttttttcatgatgtatctactcagcacacagagttgaacctttcttttgagagagcagttttgaaacactctttttgtggaatatgcaagtgggtattaggccagcttggaggatttcgttggaaacgggaatacgtataaaaagcagacagcagcattgtcagaaactactttgtgatgtttgcattcaagtcacagaattgaacactccctttcacagagcaggtttgaaacactctttttgtagtgtctgtaagtgaacatatggattgctttcaggcctaaggtgaaaaaggaaatatcttcccataaaaactagacagaagcattctcagaaacttgtttgtgatgtgtgccctctactgacagagttgaacctttctttgcaaagagcagttttgaaacactctttttgtagaatctgcaagaggatatttggatagctttgaagatttcttgggaaacgggaatgtcttcagataaactctagacagaagcattctcagaaacttctttgggatgtttcaattgaagtcacagtgttgaacattccctttcacagagcaggtttgaaacactctttttgtagtgtctataagtgaacatttggcgtgctttcaggcctaacgtgaaaaaggaaatatcttcccataaaaactagacagaagcattctcagaaacttgtttgtgatgtgtgccctctactgacagagttgaacctttctttgcaaagagcagctttgaaacactctttttgtagaatctgcaagaggatatgtggatagctttgaggatttcgttggaaacgggtatgtcttcagataaactctagacagaagcattctcagaaacttctttgggatgtttcaattgaagtcacagtgttgaacattccctttcacagagcaggtttgaaacactctttttatagtgtctataagtgaacatttggcgtgctttcaggcctaacgtgaaaaaggaaatatcttcccataaaaactagacagaagcattctcagaaacttgttcatgatgtgtgccctctactgacagagttgaacctttctttgcaaagagcagctttgaaacactctttttgtagaatctgcaagaggatatttggatagctttgaggatttcgttggaaacgggtatgtcttcagataaactctagacagaagcattctcagaaacttctttgggatgttgcattcaagtcacagagtagaacattcccattcatagagcagatttgaaacactctttttgtagtatctggaagtggacatttggagcgctttcaggcctatgttgaaaaaggaaatatcttcccataaaaactagacggaagcattctcagaaacttacttgtgatgtgtttgctcaactaacagaattgaaccatcgttttgaaggagcagttttgaaacactgttttcgtggaatctgcaagtggatatttggctagctttgaggatttcgttggaaacgggattacatataaaaaggagacagcagcattctcagaaacttctttgtgatgtctgcattcaagtcacagagttgagcattccctttcatagagcaggttggaaacactctttttgtagtatctggatgaggacatttggagcgctttcaggcgtatggtgaaaaaggaaatatcttcccgtaaaaactagacagaagcattctcagaaatttatttgtgatgtgtgccctcaactaacagagttgaacctttcttttgatagagcagttttgaaacactctttttgtaaaatctgcaagaggatatttggatagctttgaggatttcgttgcaaacgggaatggcttcatataaactctagacagaagcattctcagaaacttcgttgggatgtttcgattgaagtcccagtgttgaacattcccttttatagagcaggttggaaacactctttctgcattccctggaagtggacatttggagcgctttcaggacgacggtgaaaatggaaatatcttccaagaaaatctagatagaagcaacgtcagaaacttttctgtgatggatctactcagctaacagagttgaacctttcttttgagagagcagttttgcaacactctttttgtggaatatgcaagtggatattagggcagctttgaggatttcgttggaaacgggaatacatgtaaaaagcagacagcaagcattctcagaaaacttctttgtgatgtttgcattgaagtcacagagttgaacattccctttgagagagcaggtttgaaacacgccttttgtcatatctggaagtgtccattcggagcgcattcaggcttgtgttgaaaaaggaaatatcctcccataaaaactagacagaagcattctcagaaacttatcagtgatgtatgtactcaactaacagaactaaaccatcgttttgaaggagcagttttgaaacactctttttgcggaatctgcaagtggatatttggctagctgggaggatttcgttggaaacgggattacatacaaaaagcagacagcagcattctcagaaacttctttgtgatgtttgcattcaagtcacagagttgaacattccctttcatagagcaggtttgaaacactctttttgtagtatctggatgtggacatttggatcgctttcaggcctatggtgaaaaaggaaatatcttcccatgaaaactagacagaagcattctcagaaacttatttgtgatgtgtgccctcaactgacagtgttgaacctttgttttgatagagcagttctgaaacacactttttgtaaaatctgcaagaggatatttggatagctttgaggatttcgttggaaacgggaatgtcttcatgtaaactctagacagaagcattctcagaaactgctttgggatgtttcaattgaagtcccagtgttgaacattccctttcatagagcaggtttgaaacactctttttgtactatctggaagtggacatttggagcgctttcaggtctacggtgaaaaaggggatatcttccaataaaaactagatagaagcaatgtcagaacttttttcatgatgtatctactcagcaaacagagttgaacctttcttttgagagagcagttttgaaacactctttttgtggaatatgaaagtgggtattaggccggcttggaggatttcgttggaaacgggaatacgtataaaaagcagacagcagcattgtcagaaactactttgtgatgtttgcattcaagtcacagaattgaacactccctttcacagagcaggttcgaaacactctttttgtagtgtctgtaagtgaacatttggattgcttacaggcctaaggtgaaaaaggaaatatcttcccataaaaactagacagaagcattctcagaaacttgtttgtgatgtgtgccctctactgacagagttgaacctttccttgcaaagagcagctttgaaacactctttttgtagaatctgcaagaggctatttggatagctttgaggatttcgttggaaacggttatgtcttcagataaactctagacagaagcattctcagaaacttctttgggatgtttcaattgaagtcacagtgttgaacattccctttcacagagcaggtttgaaacactctttttgtagtgtctataagtgaacatttggtgtgctttcaggcccaacgtgaaaaaggaaatatcttcccataaaaactagacagaagcattctcagaaacttgtttgtgatgtgtgccctctactgacagagttgaacctttctttgcaaagagcagctttgaaacactcatttgtagaatctgcaagaggatatttggatagctttgaggatttcgttggaaacgggtatgtcttcagataaactctagacagaagcattctcagaaacttctttgggatgttgcattcaagtcacagagtagaacattcccattcacagagcagatttgaaacactctttttgtagtatctggaagtggacatttggagcgctttcaggtctatgtggaaaaacgaaatatcttcccataaaaactagacggaagcattctcagaaacttctttgtgatgtgtttgctcaactaacaggattgaaccatcgttttgaaggagcagttttgaaacactgttttcgtggaatctgcaagtggatatttggctagctttgaggatttcgttggaaacgggattacatatacaaaggagacagcagcattctcagaaacttctttgtgatgtctgcattcaattcacagagttgagcattccctttcatagagcaggttggaaacactctttttgtagtatctggatgaggacatttggagcgctttctggcctatggtgaaaaaggaaatatcttcctgtaaaaactagacagaagcattctcagaagtttatttgtgatgtgtgccctcaactaacagagttgaacctttcttttgatagagcagttttgaaacactctttttgtaaaatctgcaagaggatatttggatagctttgaggatttcgttgcaaacgggaatggcttcatataaactctagacagaagcattctcagaaacttcgttgggatgtttcgattgaagtcccagtgttgaacattcccttttatagagcaggttggaaacactctttctgcattccctggaagtggacatttggagcgctttcaggacgacggtgaaaatggaaatatcttccaagaaaatctagatagaagcaatgtcagaaacttttatgtgatggatctactcagctaacagagttgaagctttcttttgagagagcagttttgcaacactctttttgtggaatatgcaagtggatattagggcagctttgaggatttcgttggaaacgggaatacatgtaaaaagcagacagcagcattctcagaaacttctttgtgatgtttgcattgaagtcacagagttgaacattccctttgagagagcaggtttgaaacacgccttttgtcatatctggaagtgtccattcggagcgcattcaggcttgtgttgaaaaaggaaatatcctcccataaaaactaggacggaagcattctcagaaacttatctgtgatgtatgtactcaactaacagaactaaaccatcgttttgaaggagcagttttgaaacactctttttgcggaatctgcaagtggatatttggctagctgggaggatttcgttggaaacgggattacatacaaaaagcagacagcagcattctcagaaacttctttgtgatgtttgcattcaagtcacagagttgaacattccctttcatagagcaggtttgaaacactctttttgtagtatctggatgtggacatttggatcgctttcaggcctatggtgaaaaaggaaatatcttcccatgaaaactagacagaagcattctcagaaacttatttgtgatgtgtgccctcaactgacagtgttgaacctttgttttgatagagcagttctgaaacacactttttgtaaaatctgcaagaggatatttggatagctttgaggatttcgttgcaaacgggaatgtcttcatgtaaactctggacagaagcattctcagaaactgctttgggatgtttcaattgaagtcccagtgttgaacattccctttcatagagcaggtttgaaacactctttttgtactatctggaagtggacatttggagcgctttcaggtctacggtgaaaaaggagatatcgtccaataaaaactagatagaagcaatgtcagaacttttttcatgatgtatctactcagcaaacagagttgaacctttcgtttgagagagcagttttgaaacactctttttgtggaatatgcaagtgggtattaggccagcttggaggatttcgttggaaacgggaatacgtataaaaagcagacagcagcattgtcagaaactactttgtgatgtttgcattcaagtcacagaattgaacactccctttcacagagcaggtttgaaacactctttttgtagtgtctgtaagtgaacatttggattgctttcaggcctaaggtgaaaaaggaaatatcttcccataaaaactagacagaagcattctcagaaacttgtttgtgatgtgtgccctctactgacagagttgaacctttctttgcaaagagcagttttgaaacactctttttgtagaatctgcaagaggatatttggatagctttgaggatttcttgggaaacaggaatgtcttcagataaactctagacagaagcattctcagaaacttctttgggatgtttcaattgaagtcacagtgttgaacattccctttcacagagcaggtttgaaacactctttttgtagtgtctataagtgaacatttggcgtgctttcaggcctaacgtgaaaaaggaaatatcttcccataaaaactagacagaagcattctcagaaacttgttcgtgatgtgtgccctctactgacagagttgaacctttctttgcaaagagcagctttgaaacactctttttgtagaatctgcaagaggatatttggatagcttggaggatttcgttggaaacgggtatgtcttcagataaactctagacagaagcattctcagaaacttctttgggatgttgcattcaagttacagagtagaacattcccattcatagagcagatttgaaacactctttttgtagtatctggaagtggacatttggagcgctttcaggcctatgttgaaaaaggaaatatcttcccataaaaactagacggaagcattctcagaaacttacttgtgatgtgtttgctcaactaacagaattgaaccatcgttttgaaggagcagttttgaaacactgttttcgtggaatctgcaagtggatatttggctagccttgaggatttcgttggaaacgggattacatataaaaaggagacagcagcattctcagaaacttctttgtgatgtctgcattcaagtcacagagttgagcattccctttcatagagcaggttggaaacactctttttgtagtatctggatgaggacatttggagcgctttcaggcctatggtgaaaaaggaaatatcttcccgtaaaaactagacagaagcattctcagaaatttatttgtgatgtgtgccctcaactaacagagttgaacctttcttttgatagagcagttttgaaacactctttttgtaaaatctgcaagaggatatttggatagctttgaggatttcgttgcaaacgggaatggcttcatataaactctagacagaagcattctcagaaacgtcgttgggatgtttcgattgaagtcccagtgttgaacattcccttttatagagcaggttggaaacactctttctgcattccctggaagtggacatttggagcgctttcaggacgacggtgaaaatggaaatatcttccaagaaaatctagatagaagcaatgtcagaaacttttatgtgatggatctactcagctaacagagttgaacctttcttttgagagagcagttttgcaacactctttttgtggaatatgcaagtggatattagggcagctttgaggatttcgttggaaacgggaatacatgtaaaaagcagacagcagcattctcagaaacttctttgtgatgtttgcattgaagtcacagagttgaacattccctttgagagagcaggtttgaaacacgccttttgtcatatctggaagtgtccattcggagcgcattcaggcttgtgttgaaaaaggaaatatcctcccataaaaactagacagaagcattctcagaaacttatctgtgatgtatgtactcaactaacagaactaaaccatcgttttgaaggagcagttttgaaacactctttttgcggaatctgcaagtggatatttggctagctgggaggatttcgttggaaacgggattacatacaaaaagcagacagcagcattctcagaacttctttgtgatgtttgcattcaagtcacagagttgaacattccctttcatagagcaggtttgaaacactctttttgtagtatctggatgtggacatttggatcgctttcaggcctatggtgaaaaaggaaatatcttcccatgaaaactagacagaagcattctcagaaacttatttgtgatgtgtgccctcaactgacagtgttgaacctttgttttgatagagcagttctgaaacacactttttgtaaaatctgcaagaggatatttggatagctttgaggatttcgttggaaacgggaatgtcttcatgtaaactctagacagaagcattctcagaaactgctttgggatatttcaattgaagtcccagtgttgaacattccctttcatagagcaggtttgaaacactctttttgtactatctggaagtggacatttggagcgctttcaggtctacggtgaaaaaggagatatcttccaataaaaactagatagaagcaatgtcagaacttttttcatgatgtatctactcagcaaacagagttgaacctttcttttgggagagcagttttgaaacactctttttgtggaatatgcaagtgggtattaggccagcttggaggatttcgttggaaacgggaatacgtataaaaagcagacagcagcattgtcagaaactactttgtgatgtttgcattcaagtcacagaattgaacactccctttcacagagcaggtttgaaacactctttttgtagtgtctgtaagtgaacatttggattgctttcaggcctaaggtgaaaaaggaaatatcttcccataaaaactagacagaagcattctcagaaacttgtttgtgatgtgtgccctctactgacagagttgaacctttctttgcaaagagcagttttgaaacactctttttgtagaatctgcaaaaggatatttggatagctttgaggatttcttgggaaacgggaatgtcttcagataaactctagacagaagcattctcagcaaacttctttgggatgtttcaattgaagtcacagtgttgaacatttcctttcacagagcaggtttgaaacactctttttgtagtgtctataagtgaacatttggcgtgctttcaggcctaatgtgaaaaaggaaatatcttcccataaaaactagacagaagcattctcagaaacttgttcgtgatgtgtgccctctactgacagagttgaacctttctttgcaaagagcagctttgaaacactctttttgtagaatctgcaagaggatatgtggatagctttgaggatttcgttggaaacgggtatgtcttcagataaactccagacagaagcattctcagaaacttctttgggatgtttcaattgaagtcacagtgttgaacattccctttcacagagcaggtttgaaacactctttttgtagtgtctataagtgaacatttggcgtgctttcaggcctaacgtgaaaaaggaaatatcttcccataaaaactagacagaagcattctcagaaacttgttcatgatgtgtgccctctactgacagagttgaacctttctttgcaaagagcagctttgaaacactctttttgtagaatctgcaagaggatatttggatagcttggaggatttcgttggaaacgggtatgtcttcagataaactctagacagaagcattctcagaaacttctttgggatgttgcattcaagtcacagagtagaacattcccattcatagagcagatttgaaacactctttttgtagtatctggaagtggacatttggagcgctttcaggcctatgttgaaaaaggaaatatcttcccataaaaactagacggaagcattctcagaaacttacttgtgatgtgtttgctcaactaacagaattgaaccatcgttttgaaggagcagttttgaaacactgttttcgtggaatctgcaagtggatatttggctagctttgaggatttcgttggaaacgggattacatataaaaaggagacagcagcattctcagaaacttctttgtgatgtctgcattcaagtcacagagttgagcattccctttcatagagaaggttggaaacactctttttgtagtatctggatgaggacatttggagcgctttcaggcgtatggtgaaaaaggaaatatcttcccgtaaaaactagacagaagcattctcagaaatttatttgtgatgtgtgccctcaactaacagagttgaacctttcttttgatagagcagttttgaaacactctttttgtaaaatctgcaagaggatatttggatagctttgaggatttcgttgcaaacgggaatggcttcatataaactctagacagaagcattctcagaaacttcgttgggatgtttcgattgaagtcccagtgttgaacattcccttttatagagcaggttggaaacactctttctgcattccctggaagtggacatttggagcgctttcaggacgacggtgaaaatggaaatatcttccaagaaaatctagatagaagcaatgtcagaaacttttatgagatggatctactcagctaacagagttgaacctttcttttgagagagcagttttgcaacactctttttgtggaatatgcaagtggatattagggcagctttgaggatttcgttggaaacgggaatacatgtaaaaagcagacagcagcattctcagaaacttctttgtgatgtttgcattgaagtcacagagttgaacattccctttgagagagcaggtttgaaacacgccttttgtcatatctggaagtgtccattcggagcgcattcaggcttgtgttgaaaaaggaaatatcctcccataaaaactagacagaagcattctcagaaacttatctgtgatgtatgtactcaactaacagaactaaaccatcgttttgaaggagcagttttgaaacactctttttgcggaatctgcaagtggatatttggctagctgggaggatttcgttggaaacgggattacatacaaaaagcagacagcagcattctcagaaacttctttgtgatgtttgcattcaagtcacagagttgaacattccctttcatagagcaggtttgaaacactctttttgtagtatctggatgtggacatttggatcgctttcaggcctatggtgaaaaaggaaatatcttcccatgaaaactagacagaagcattctcagaaacttatttgtgatgtgtgccctcaactgacagtgttgaacctttgttttgatagagcagttctgaaacacactttttgtaaaatctgcaagaggatatttggatagctttgaggatttcgttggaaacgggaatgtcttcatgtaaactctacacagaagcattctcagaaactgctttgggatgtttcaattgaagtcccagtgttgaacattcccattcatagagcaggtttgaaacactctttttgtactatctggaagtggacatttggagcgctttcaggtctacggtgaaaaaggagatatcttccaataaaaactagatagaagcaatgtcagaacttttttcatgatgtatctactcagctaacagagttgaacctttcttttgagagagcagttttgaaacactctttttgtggaatatgcaagtgggtattaggccagcttggaggatttcgttggaaacgggaatacgtataaaaagcagacagcagcattgtcagaaactactttgtgatgtttgcattcaagtcacagaattgaacactccctttcacagagcaggtttgaaacactctttttgtagtgtctgtaagtgaacatttggattgatttcaggcctaaggtgaaaaaggaaatatcttcccataaaaactagacagaagcattctcagaaacttgtttgtgatgtgtgccctctactgacagagttgaacctttctttgcaaagagcagttttgaaacactctttttgtagaatctgcaagaggatatttggatagctttgaggatttcttgggaaacgggaatgtcttcagataaactctagacagaagcattctcagaaacttctttgggatgtttcaattgaagtcacagtgttgaacattccctttcacagagcaggtttgaaacactctttttgtagtgtctataagtgaacatttggcgtgctttcaggcgtaacgtgaaaaaggaaatatcttcccataaaaactagacagaagcattctcagaaacttgttcgtgatgtgtgccctctactgacagagttgaacctttctttgcaaagagcagctttgaaacacactttttgtagaatctgcaagaggatatttggatagctttgaggatttcttgggaaacgggtatgtcttcagataaactctagacagaagcattctcagaaatttctttgggatgttgcatgcaagtcacagagtagaacattcccattcatagagcagatttgaaacactctttttgtactatctggaagtggacatttggagcgctttcaggcctatgttgaaaaaggaaatatcttcccataaaaactagacggaagcattctcagaaacttaattgtgatgagtttgctcaactaacaggattgaaccatcgttttgaaggagcagttttgaaacactgttttcgtggaatctgcaagtggatatttggctagctttgaggatttcgttggaaacgggattacatataaaaaggagacagcagcattctcagaaacttctttgtgatgtctgcattcaattcacagagttgagcattccctttcatagagcaggttggaaacactctttttgtagtatctggatgaggacatttggagcgctttcaggcgtatggtgaaaagggaaatatcttcccgtaaaaactagacagaagcattctcagaagtttatttgtgatgtgtgccctcaactaacagagttggacctttcttttgatagagcagttttgaaacactctttttgtaaaatctgcaagaggatatttggatagctttgaggatttcgttgcaaacgggaatggcttcatataaactctagacagaagcattctcagaaacttcgttgggatgtttcgattgaagtcccagtgttgaacattcccttttatagagcaggttggaaacactctttctgcattccctggaagtggacatttggagcgctttcaggacgacggtgaaaatggaaatatcttccaagaaaatctagatagaagcaacgtcagaaacttttctgtgatggatctactcagctaacagagttgaacctttcttttgagagagcagttttgcaacactctttttgtggaatatgcaagtggatattagggcagctttgaggatttcgttggaaacgggaatacatgtaaaaagcagacagcagcattctcagaaacttctttgtgatgtttgcattgaagtcacagagttgaacattccctttgagagagcaggtttgaaacacgccttttgtcatatctggaagtgtccattcggagcgcattcaggcttgtgttgaaaaagaaaatatcctcccataaaaactagacagaagcattctcagaaacttatctgtgatgtatgtactcaactaacagaactaaaccatcgttttgaaggagcagttttgaaacactctttttgcggaatctgcaagtggatatttggctagctgggaggatttcgttggaaacgggattacatacaaaaagcagacagcagcattctcagaaacttctttgtgatgtttgcattcaagtcacagagttgaacattccctttcatagagcaggtttgaaacactctttttgtagtatctggatgtggacatttggatcgctttcaggcctatggtgaaaaaggaaatatcttcccatgaaaactagacagaagcattctcagaaacttatttgtgatgtgtgccctcaactgacagtgttgaacctttgttttgatagagcagttctgaaacacactttttgtaaaatctgcaagaggatatttggatagctttgaggatttcgttggaaacgggaatgtcttcatgtaaactctagacagaagcattctcagaaactgctttgggatgtttcaattgaagtcccagtgttgaacattcccattcatagagcaggtttgaaacactctttttgtactatctggaagtggacatttggagcgctttcaggtctacggtgaaaaaggagatatcttccaataaaaactagatagaagcaatgtcagaacttttttcatgatgtatctactcagcaaacagagttgaacctttcttttgagagagcagttttgaaacagtctttgtggaatatgcaagtgggtattaggccagcttggaggatttcgttggaaacgggaatacgtataaaaagcagacagcagcattgtcagaaactactttgtgatgtttgcattcaagtcacagaattgaacactccctttcacagagcaggtttgaaacactctttttgtagtgtctgtaagtgaacatttggattgctttcaggcctaaggtgaaaaaggaaatatcttcccataaaaactagacagaagcattctcagaaacttgtttgtgatgtgtgccctctactgacagagttgaacctttctttgcaaagagcagttttgaaacactctttttgtagaatctgcaagaggatatttggatagctttgaggatttcttgggaaacgggaatgtcttcagataaactctagacagaagcattctcagaaacttctttgggatgtttcaattgaagtcacagtgttgaacattccctttcacagagcaggtttgaaacactctttttgtagtgtctataagtgaacatttggcgtgctttcaggcgtaacgtgaaaaaggaaatatcttcccataaaaattagacagaaagcattctcagcaaacttgttcgtgatgtgtgccctctactgatagagttgaacctttctttgcaaagagcagctttgaaacacactttttgtagaatctgcaagaggatatttggatagctttgaggatttcgttggaaacgggtatgtcttcagataaactctagacagaagcattctcagaaacttctttgggatgttgcattcaagtcacagagtagaacattcccattcatagagcagatttgaaacactctttttgtagtatctggaagtggacatttggagcgctttcaggcctatgttgaaaaaggaaatatcttcccataaaaactagacggaagcattctcagaaacttatttgtgatgtgtttgctcaactaacaggattgaaccatcgttttgaaggagcagttttgaaacactgttttcgtggaatctgcaagtggatatttggctagctttgaggatttcgttggaaacgggattacatataaaaaggagacagcagcattctcagaaacttctttgtgatgtttgcattcaagtcacagagttgaacattccctttcatagagcaggtttgaaacactctttttgtagtatctggatgtggacatttggatcgctttcaggcctatggtgaaaaaggaaatatcttcccatgaaaactagacagaagcattctcagaaacttatttgtgatgtgtgccctcaactgacagtgttgaacctttgttttgatagagcagttctgaaacacactttttgtaaaatctgcaagaggatatttggatagctttgaggatttcgttggaaacgggaatgtcttcatgtaaactctacacagaagcattctcagaaactgctttgggatgtttcaattgaagtcccagtgttgaacattcccattcatagagcaggtttgaaacactctttttctactatctggaagtggacatttggagcgctttcaggtctacggtgaaaaaggagatatcttccaataaaaactagatagaagcaatgtcagaactattttcatgatgtatctactcagcaaacagagttgaacctttcttttgagagagcagttttgacactgtctttgtggaatatgcaagtgggtattaggccagcttggaggatttcgttggaaacgggaatacgtataaaaaagcagacagcagcattgtcagaaactactttgtgatgtttgcattcaagtcacagaattgaacactccctttcacagagcaggtttgaaacactctttttgtagtgtctgtaagtgaacatatggattgctttcaggcctaaggtgaaaaaggaaatatcttcccataaaaactagacagaagcattctcagaaacttgtttgtgatgtgtgccctctactgacagagttgaacctttctttgcaaagagcagttttgaaacactctttttgtagaatctgcaagaggatatttggatagctttgaggatttcttgggaaacgggaatgtcttcagataaactctagacagaagcattctcagaaacttctttgggatgtttcaattgaagtcacagtgttgaacattccctttcacagagcaggtttgaaacactctttttgtagtgtctataagtgaacatttggcgtgctttcaggcgtaacgtgaaaaaggaaatatcttcccataaaaactagacagaagcattctcagaaacttgttcttgatgtgtcccctctactgacagagttgaacctttctttgcaaagagcagctttgaaacactctttttgtagaatctgcaagaggatatttggatagctttgaggatttcgttggaaacgggtatgacttcagataaactctagacagaagcattctcagaaacttctttgggatgttgcattcaagtcacagagtagaacattcccattcatagagcagatttgaaacactctttttgtagtatctggaagtggacatttggagcgctttcaggcctatgttgaaaaaggaaatatcttcccataaaaactagacggaagcattctcagaaacttatttgtgatgtgtttgctcaactaacaggattgaaccatcgttttgaaggagcagttttgaaacactgttttcgtggaatctgcaagtggatatttggctagctttgaggatttcgttggaaacgggattacatatacaaaggagacagcagcattctcagaaacttctttgtgatgtctgcattcaagtcacagagttgagcattccctttcatagagcaggttggaaacactctttttgtagtatctggatgaggacatttggagcgctttcaggcgtatggtgaaaaaggaaatatcttcccgtaaaaactagacagaagcattctcagaaatttatttgtgatgtgtgccctcaactaacagagttgaacctttcttttgatagagcagttttgaaacactctttttgtaaaatctgcaagaggatatttggatagctttgaggatttcgttgcaaacgggaatggcttcatataaactctagacagaagcattctcagaaacttcgttgggatgtttcgattgaagtcccagtgttgaacattcccttttatagagcaggttggaaacactctttctgcattccctggaagtggacatttggagcgctttcaggacgacggtgaaaatggaaatatcttccaagaaaatctagatagaagcaacgtcagaaacttttctgtgatggatctactcagctaacagagttgaacctttcttttgagagagcagttttgcaacactctttttgtggaatatgcaagtggatattagggcagctttgaggatttcgttggaaacgggaatacatgtaaaaagcagacagcagcattctcagaaacttctttgtgatgtttgcattgaagtcacagagttgaacattccctttgagagagcaggtttgaaacacgccttttgtcatatctggaagtgtccattcggagcgcattcaggcttgtgttgaaaaaggaaatatcctcccataaaaactagacagaagcattctcagaaacttatctgtgatgtatgtactcaactaacagaactaaaccatcgttttgaaggagcagttttgaaacactctttttgcggaatctgcaagtggatatttggctagctgggaggatttcgttggaaacgggattacatacaaaaagcagacagcagcattctcagaaacttctttgtgatgtttgcattcaagtcacagagttgaacattccctttcatagagcaggtttgaaacactctttttgtagtatctggatgtggacatttggatcgctttcaggcctatggtgaaaaaggaaatatcttcccatgaaaactagacagaagcattctcagaaacttatttgtgatgtgtgccctcaactgacagtgttgaacctttgttttgatagagcagttctgaaacacactttttgtaaaatctgcaagaggatatttggatagctttgaggatttcgttggaaacgggaatgtcttcatgtaaactctagacagaagcattctcagaaactgctttgggatgtttcaattgaagtcccagtgttgaacattccctttcatagagcaggtttgaaacactctttttgtactatctggaagtggacatttggagcgctttcaggtctacggtgaaaaaggagatatcttccaataaaaactagatagaagcaatgtcagaacttttttcatgatgtatctactcagcaaacagagttgaacctttcttttgagagagcagttttgaaacactccttttgtggaatatgcaagtgggtattaggccagcttggaggatttcgttggaaacgggaatacgtataaaaagcagacagcagcattgtcagaaactactttgtgatgtttgcattcaagtcacagaattgaacactccctttcacagagcaggtttgaaacactctttttgtagtgtctataagtgaacatttggcgtgctttcaggcctaaggtgaaaaaggaaatatcttcccataaaaactagacagaagcattctcagaaacttgttcgtgatgtgtgccctctactgacagagttgaacctttctttgcaaagagcagctttgaaacactctttttgtagaatctgcaagaggatatttggatagctttgaggatttcgttggaaacgggtatgtcttcagataaactctagacagaagcattctcagaaacttctttgggatgttgcattcaagtcacagagtagaacattcccattcatagagcagatttgaaacactctttttgtagtatctggaagtggacatttggagcgctttcaggcctatgttgaaaaaggaaatatcttcccataaaaactagacggaagcattctcagaaacttacttgtgatgtgtttgctcaactaacagaattgaaccatcgttttaaaggagcagttttgaaacactgttttcgtggaatctgcaagtggatatttggctagctttgaggatttcgttggaaacgggattacatataaaaaggagacagcagcattctcagaaacttctttgtgatgtctgcattcaagtcacagagttgagcattccctttcatagagcaggttggaaacactctttttgtagtatctggatgaggacatttggagcgctttcaggcgtatggtgaaaaaggaaatatcttcccgtaaaaactagacagaagcattctcagaaatttatttgtgatgtgtgccctcaactaacagagttgaacctttcttttgatagagcagttttgaaacactctttttgtaaaatctgcaagaggatatttggatagctttgaggatttcgttgcaaacgggaatggcttcatataaactctagacagaagcattctcagaaacttcgttgggatgtttcgattgaagtcccagtgttgaacattcccttttatagagcaggttggaaacactctttctgcattccctggaagtggacatttggagcgctttcaggacgacggtgaaaatggaaatatcttccaagaaaatctagatagaagcaacgtcagaaacttttctgtgatggatctactcagctaacagagttgaacctttcttttgagagagcagttttgcaacactctttttgtggaatatgcaagtggatattagggcagctttgaggatttcgttggaaacgggaatacatgtaaaaagcagacagcagcattctcagaaacttctttgtgatgtttgcattgaagtcacagagttgaacattccctttgagagagcaggtttgaaacacgccttttgtcatatctggaagtgtccattcggagcgcattcaggcttgtgttgaaaaaggaaatatcctcccataaaaactagacagaagcattctcagaaacttatctgtgatgtatgtactcaactaacagaactaaaccatcgttttgaaggagcagttttgaaacactctttttgcggaatctgcaagtggatatttggctagctgggaggatttcgttggaaacgggattacatacaaaaagcagacagcagcattctcagaaacttctttgtgatgtttgcattcaagtcacagagttgaacattccctttcatagagcaggtttgaaacactctttttgtagtatctggatgtggacatttggatcgctttcaggcctatggtgaaaaaggaaatatcttcccatgaaaactagacagaagcattctcagaaacttatttgtgatgtgtgccctcaactgacagtgttgaacctttgttttgatagagcagttctgaaacacactttttgtaaaatctgcaagaggatatttggatagctttgaggatttcgttggaaacgggaatgtcttcatgtaaactctggacagaagcattctcagaaactgctttgggatgtttcaattgaagtcccagtgttgaacattcccattcatagagcaggtttgaaacactctttttgtactatctggaagtggacatttggagcgctttcaggtctacggtgaaaaaggagatatcttccaataaaaactagatagaagcaatgtcagaacttttttcatgatgtatctactcagcaaacagagttgaacctttcttttgagagagcagttttgaaacactctttttgtggaatatgcaagtgggtattaggccagcttggaggatttcgttggaaacgggaatacgtataaaaagcagacagcagcattgtcagaaactactttgtgatgtttgcattcaagtcacagaattgaacactcccctttcacagagcaggtttcaaacactgtttttgtagtgtctgtaagtgaacatatggattgctttcaggcctaaggtgaaaaaggaaatatcttcccataaaaactagacagaagcattctcagaaacttgtttgtgatgtgtgccctctactgacagagttgaacctttctttgcaaagagcagttttgaaacactcttcttgtagaatctgcaagaggatatttggatagctttgaggatttcttgggaaacgggaatgtcttcagataaactctagacagaagcattctcagaaacttctttgggatgtttcaattgaagtcacagtgttgaacattccctttcacagagcaggtttgaaacactctttttgtagtgtctataagtgaacatttggcgtgctttcaggcctaacgtgaaaaaggaaatatcttcccataaaaactagacagaagcattctcagaaacttgttcttgatgtgtcccctctactgacagagttgaacctttctttgcaaagagcagctttgaaacactctttttgtagaatctgcaagaggatatttggatagcttggaggatttcgttggaaacgggtatgtcttcagataaactctagacagaagcattctcagaaacttctttgggatgttgcattcaagtcacagagtagaacattcccattcatagagcagatttgaaacactctttttgtagtatctggaagtggacatttggagcgctttcaggcctatgttgaaaaaggaaatatcttcccataaaaactagacggaagcattctcagaaacttatttgtgatgtgtttgctcaactaacaggattgaaccatcgttttgaaggagcagttttgaaacactgttttcgtggaatctgcaagtggatatttggctagctttgaggatttcgttggaaacgggattacatataaaaaggagacagcagcattctcagaaacttctttgtgatgtctgcattcaattcacagagttgagcattccctttcatagagcaggttggaaacactctttttgtagtatctggatgaggacatttggagcgctttcaggcgtatggtgaaaaaggaaatatcttcccgtaaaaactagacagaagcattctcagaagtttatttgtgatgtgtgccctcaactaacagagttgaacctttcttttgatagagcagttttgaaacactctttttgtaaaatctgcaagaggatatttggatagctttgaggatttcgttgcaaacgggaatggcttcatataaactctagacagaagcattctcagaaacttcgttgggatgtttcgattgaagtcccagtgttgaacattcccttttatagagcaggttggaaacactctttctgcattccctggaagtggacatttggagcgctttcaggacgacggtgaaaatggaaatatcttccaagaaaatctagatagaagcaacgtcagaaacttttctgtgatggatctactcagctaacagagttgaacctttcttttgagagagcagttttgcaacactctttttgtggaatatgcaagtggatattagggcagctttgaggatttcgttggaaacgggaatacatgtaaaaagcagacagcagcattctcagaaacttctttgtgatgtttgcattgaagtcacagagttgaacattccctttgagagagcaggtttgaaacacgccttttgtcatatctggaagtgtccattcggagcgcattcaggcttgtgttgaaaaaggaaatatcctcccataaaaactagacagaagcattctcagaaacttatctgtgatgtatgtactcaactaacagaactaaaccatcgttttgaaggagcagttttgaaacactctttttgcggaatctgcaagtggatatttggctagctgggaggatttcgttggaaacgggattacatacaaatagcagacagcagcattctcagaaacttctttgtgatgtttgcattcaagtcacagagttgaacattccctttcatagagcaggtttgaaacactctttttgtagtatctggatgtggacatttggatcgctttcaggcctatggtgaaaaaggaaatatcttcccatgaaaactagacagaagcattctcagaaacttatttgtgatgtgtgccctcaactgacagtgttgaacctttgttttgatagagcagttctgaaacacactttttgtaaaatctgcaagaggatatttggatagctttgaggatttcgttggaaacgggaatgtcttcatgtaaactctacacagaagcattctcagaaactgctttgggatgtttcaattgaagtcccagtgttgaacattccctttcatagagcaggtttgaaacactctttttgtactatctggaagtggacatttggagcgctttcaggtctacggtgaaaaaggagatatcttccaataaaaactagatagaagcaatgtcagaacttttttcatgatgtatctactcagcaaacagagttgaacctttcttttgagagagcagttttgaaacactctttttgtggaatatgtaagtgggtattaggccagcttggaggatttcgttggaaacgggaatacgtataaaaagcagacagcagcattgtcagaaactactttgtgatgtttgcattcaagtcacagaattgaacactccctttcacagagcaggtttgaaacactctttttgtagtgtctgtaagtgaacatttggattgctttcaggcctaaggtgaaaaaggaaatatcttcccataaaaactagacagaagcattctcagaaacttgtttgtgatgtgtgccctctactgacagagttgaacctttctttgcaaagagcagttttgaaacactctttttgtagaatctgcaagaggatatttggatagctttgaggatttcttgggaaacgggaatgtcttcagataaactctagacagaagcattctcagaaacttctttgggatgtttcaattgaagtcacagtgttgaacattccctttcacagagcaggtttgaaacactctttttgtagtgtctataagtgaacatttggcgtgctttcaggcgtaacgtgaaaaaggaaatatcttcccataaaaaccagacagaagcattctcagaaacttgttcgtgatgtgtgccctctactgacagagttgaacctttctttgcaaagagcagctttgaaacactctttttgtagaatctgcaagaggatatttggatagctttgaggatttcgttggaaacgggtatgtcttcagataaactctagacagaagcattctcagaaacttctttgggatgttgcattcaagtcacagagtagaacattcccattcatagagcagatttgaaacactctttttgtagtatctggaagtggacatttggagcgctttcaggcctatgttgaaaaaggaaatatcttcccataaaaactagacggaagcattctcagaaacttacttgtgatgtgtttgctcaactaacagaattgaaccatcgttttgaaggagcagttttgaaacactgttttcgtggaatctgcaagtggatatttggctagctttgaggatttcgttggaaacgggattacatatacaaaggagacagcagcattctcagaaacttctttgtgatgtctgcattcaagtcacagagttgagcattccctttcatagagcaagttggaaacactctttttgtagtatctggatgaggacatttggagcgctttcaggcctatggtgaaaaaggaaatatcttcccgtaaaaactagacagaagcattctcagaaatttatttgtgatgtgtgccctcaactaacagagttgaacctttcttttgatagagcagttttgaaacactctttttgtaaaatctgcaagaggatatttggatagctttgaggatttcattgcaaacgggaatggcttcatataaactctagacagaagcattctcagaaacttcgttgggatgtttcgattgaagtcccagtgttgaacattcccttttatagagcaggttggaaacactctttctgcattccctggaagtggacatttggagcgctttcaggacgacggtgaaaatggaaatatcttccaacaaaatctagatagaagcaacgtcagaaacttttctgtgatggatctactcagctaacagagttgaacctttcttttgagagagcagttttgcaacactctttttgtggaatatgcaagtggatattagggcagctttgaggatttcgttggaaacgggaatacatgtaaaaagcagacagcagcattctcagaaacttctttgtgatgtttgcattgaagtcacagagttgaacattccctttgagagagcaggtttgaaacacgccttttgtcatatctggaagtgtccattcggagcgcattcaggcttgtgttgaaaaaggaaatatcctcccataaaaactagacagaagcattctcagaaacttatctgtgatgtatgtactcaactaacagaactaaaccatcgttttgaaggagcagttttgaaacactctttttgcggaatctgcaagtggatatttggctagctgggaggatttcgttggaaacgggattacatacaaaaagcagacagcagcattctcagaaacttctttgtgatgtttgcattcaagtcacagagttgaacattccctttcatagagcaggtttgaaacactctttttgtagtatctggatgtggacatttggatcgctttcaggcctatggtgaaaaaggaaatatcttcccatgaaaactagacagaagcattctcagaaacttatttgtgatgtgtgccctcaactgacagtgttgaacatttgttttgatagagcagttctgaaacacactttttgtaaaatctgcaagaggatatttggatagctttgaggatttcgttggaaacgggaatgtcttcatgtaaactctacacagaagcattctcagaaactgctttgggatgtttcaattgaagtcccagtgttgaacattcccattcatagagcaggtttgaaacactctttttgtactatctggaagtggacatttggagcgctttcaggtctacggtgaaaaaggagatatcttccaataaaaactagatagaagcaatgtcagaacttttttcatgatgtatctactcagctaacagagttgaacctttcttttgagagagcagttttgaaacactctttttgtggaatatgcaagtgggtattaggccagcttggaggatttcgttggaaacgggaatacgtataaaaagcagacagcagcattgtcagaaactactttgtgatgtttgcattcaagtcacagaattgaacactccctttcacagagcaggtttgaaacactctttttgtagtgtctgtaagtgaacatatggattgctttcaggcctaaggtgaaaaaggaaatatcttcccataaaaactagacagaagcattctcagaaacttgtttgtgatgtgtgccctctactgacagagttgaacctttctttgcaaagagcagttttgaaacactctttttgtagaatctgcaagaggatatttggatagctctgaggatttcttgggaaacgggaatgtcttcagataaactctagacagaagcattctcagaaacttctttgggatgtttcaattgaagtcacagtgttgaacattccctttcacagagcaggtttgaaacactctttttgtagtgtctataagtgaacatttggcgtgctttcaggcctaacgtgaaaaaggaaatatcttcccataaaaactagacagaagcattctcagaaacttgttcatgatgtgtgccctctactgacagagttgaacctttctttgcaaagagcagctttgaaacactctttttgtagaatctgcaagaggatatttggatagctttgaggatttcgttggaaacgggtatgtcttcagataaactctagacagaagcattctcagaaacttctttgggatgttgcattcaagtcacagagtagaacattcccattcatagagcagatttgaaacactctttttgtagtatctggaagtggacatttggagcgctttcaggcctatgttgaaaaaggaaatatcttcccataaaaactagacggaagcattctcagaaacttacttgtgatgtgtttgctcaactaacaggattgaaccatcgttttgaaggagcagttttgaaacacagttttcgtggaatctgcaagtggatatttggctagctttgaggatttcgttggaaacgggattacatataaaaaggagacagcagcattctcagaaacttctttgtgatgtctgcattcaattcacagagttgagcattccctttcatagagcaggttggaaacactctttttgtagtatctggatgtggacatttggatcgctttcaggcctatggtaaaaaaggaaatatcttcccatgaaaactagacagaagcattctcagaaacttatttgtgatgtgtgcactcaactgacagtgttgaacctttgttttgatagagcagttctgaaacacactttttgtaaaatctgcaagaggatatttggatagctttgaggatttcgttggaaacgggaatgtcttcatgtaaactctagacagaagcattctcagaaactgctttgggatgtttcaattgaagtcccagtgttgaacattcccattcatagagcaggtttgaaacactctttttctactatctggaagtggacatttggagcgctttcaggtctacggtgaaaaaggagatatcttccaataaaaactagatagaagcaatgtcagaacttttttcatgatgtatctactcagcaaacagagttgaacctttcttttgagagagcagttttgaaacactctttttgtggaatatgcaagtgggtattaggccagcttggaggatttcgttggaaacgggaatacgtataaaaagcagacagcagcattgtcagaaactactttgtgatgtttgcattcaagtcacagaattgaacactccctttcacagagcaggtttgaaacactctttttgtagtgtctgtaagtgaacatttggattgctttcaggcctatggtgaaaaaggaaatatcttcccataaaaactagacagaagcattctcagaaacttgtttgtgatgtgtgccctctactgacagagttgaacctttctttgcaaagagcagttttgaaacactctttttgtagaatctgcaagaggatatttggatagctttgaggatttcttgggaaacgggaatgtcttcagataaactctagacagaagcattctcagaaacttctttgggatgtttcaattgaagtcacagtgttgaacattccctttcacagagcaggtttgaaacactctttttgtagtgtctataagtgaacatttggcgtgctttcaggcctaacgtgaaaaaggaaatatcttcccataaaaactagacagaagcattctcagaaatttgttcgtgatgtgtgccctctactgacagagttgaacctttctttgcaaagagcagctttgaaacacactttttgtagaatctgcaagaggatatttggatagctttgaggatttcgttggaaacgggtatgtcttcagataaactctagacagaagcattctcagaaacttctttgggatgttgcattcaagtcacagagtagaacattcccattcatagagcagatttgaaacactctttttgtagtatctggaagtggacatttggagcgctttcaggcctatgttgaaaaaggaaatatcttcccataaaaactagacggaagcattctcagaaacttatttgtgatgtgtttgctcaactaacaggattgaaccatcgttttgaaggagcagttttgaaacactgttttcgtggaatctgcaagtggatatttggctagctttgaggatttcgttggaaacgggattacatataaaaaggagacagcagcattctcagaaacttctttgtgatgtctgcattcaattcacagagttgggcattccctttcatagagcaggttggaaacactctttttgtagtatcctggatgaggacatttggagcgctttcaggcgtatggtgaaaaaggaaatatcttcccgtaaaaactagacagaagcattctcagaagtttatttctgatgtgtgccctcaactaacagagttgaacctttcttttgatagagcagttttgaaacactctttttgtaaaatctgcaagaggatatttggatagctttgaggatttcgttgcaaacgggaatggcttcatataaactctagacagaagcattctcagaaacttcgttgggatgtttcgattgaagtcccagtgttgaacattcccttttatagagcaggttggaaacactctttctgcattccctggaagtggacatttggagcgctttcaggacgacggtgaaaatggaaatatcttccaagaaaatctagatagaagcaatgtcagaaacttttatgtgatggatctactcagctaacagagttgaacctttcttttgagagagcagttttgcaacactctttttgtggaatatgcaagtggatattagggcagctttgaggatttcgttggaaacgggaatacatgtaaaaagcagacagcagcattctcagaaacttctttgtgatgtttgcattgaagtcacagagttgaacattccctttgagagagcaggtttgaaacacgccttttgtcatatctggaagtgtccattcggagcgcattcaggcttgtgttgaaaaaggaaatatcctcccataaaaactagacagaagcattctcagaaacttatctgtgatgtatgtactcaactaacagaactaaaccatcgttttgaagggcagttttgaaacactctttttgcggaatctgcaagtggatatttggctagctgggaggatttcgttggaaacgggattacatacaaaaagcagacagcagcattctcagaaacttctttgtgatgtttgcattcaagtcacagagttgaacattccctttcatagagcaggtttgaaacactctttttgtagtatctggatgtggacatttggatcgctttcaggcctatggtgaaaaaggaaatatcttcccatgaaaactagacagaagcattctcagaaacttatttgtgatgtgtgccctcaactgacagtgttgaacctttgttttgatagagcagttctgaaacacactttttgtaaaatctgcaagaggatatttggatagctttgaggatttcgttggaaacgggaatgtcttcatgtaaactctacacagaagcattctcagaaactgctttgggatgtttcaattgaagtcccagtgttgaacattccctttcatagagcaggtttgaaaccctctttttgtactatctggaagtggacatttggagcgctttcaggtctacggtgaaaaaggagatatcttccaataaaaactagatagaagcaatgtcagaacttttttcatgatgtatctactcagcaaacagagttgaacctttcttttgagagagcagttttgaaacactccttttgtggaatatgcaagtgggtattaggccagcttggaggatttcgttggaaacgggaatacgtataaaaagcagacagcagcattgtcagaaactactttgtgatgtttgcattcaagtcacagaattgaacactccctttcacagagcaggtttgaaactctctttttgtagtgtctataagtgaacatttggcgtgctttcaggcgtaacgtgaaaaaggaaatatcttcccataaaaactagacagaagcattctcagaaacttgtttgtgatgtgtgccctctactgacagagttgaacctttctttgcaaagagcagttttgaaacactctttttgtagaatctgcaagaggatatttggatagctttgaggatttcttgggaaacgggaatgtcttcagataaactctagacagaagcattctcagaaacttctttgggatgtttcaattcaagtcacagtgttgaacattccctttcacagagcaggtttgaaacactctttttgtagtgtctataagtgaacatttggcgtgctttcaggcgtaacgtgaaaaaggaaatatcttcccataaaaactagacagaagcattctcagaaacttgttcttgatgtgtcccctctactgacagagttgaacctttctttgcaaagagcagctttgaaacactctttttgtagaatctgcaagaggatatttggatagcttggaggatttcgttggaaacgggtatgtcttcagataaactctagacagaagcattctcagaaacttctttgggatgttgcattcaagtcacagagtagaacattcccattcatagagcagatttgaaacactctttttgtagtatctggaagtggacatttggagcgctttcaggcctatgttgaaaaaggaaatatcttcccataaaaactagacggaagcattctcagaaacttatttgtgatgtgtttgctcaactaacaggattgaaccatcgttttgaaggagcagttttgaaacactgttttcgtggaatctgcaagtggatatttggctagctttgaggatttcgttggaaacgggattacatataaaaaggagacagcagcattctcagaaacttctttgtgatgtctgcattcaattcacagagttgagcattccctttcatagagcaggttggaaacactctttttgtagtatctggatgaggacatttggagcgctttcaggcgtatggtgaaaaaggaaatatcttcccgtaaaaactagacagaagcattctcagaagtttatttgtgatgtgtgccctcaactaacagagttgaacctttcttttgatagagcagttttgaaacactctttttgtaaaatctgcaagaggatatttggatagctttgaggatttcgttgcaaacgggaatggcttcatataaactctagacagaagcattctcagaaacttcgttgggatgtttcgattgaagtcccagtgttgaacattcccttttatagagcaggttggaaacactctttctgcattccctggaagtggacatttggagcgctttcaggacgacggtgaaaatggaaatatcttccaagaaaatctagatagaagcaatgtcagaaacttttatgtgatggatctactcagctaacagagttggacctttcttttgagagagcagttttgcaacactctttttgtggaatatgcaagtggatattagggcagctttgaggatttcgttggaaacgggaatacatgtaaaaagcagacagcagcattctcagaaacttctttgtgatgtttgcattgaagtcacagagttgaacattccctttgagagagcaggtttgaaacacgccttttgtcatatctggaagtgtccattcggagcgcattcaggcttgtgttgaaaaaggaaatatcctcccataaaaactagacagaagcattctcagaaacttatctgtgatgtatgtactcaactaacagaactaaaccatcgttttgaaggagcagttttgaaacactctttttgcggaatctgcaagtggatatttggctagctgggaggatttcgttggaaacgggattacatacaaaaagcagacagcagcattctcagaaacttctttgtgatgtttgcattcaagtcacagagttgaacattccctttcatagagcaggtttgaaacactctttttgtagtatctggatgtggacatttggatcgctttcaggcctatggtgaaaaaggaaatatcttcccatgaaaactagacagaagcattctcagaaacttatttgtgatgtgtgccctcaactgacagtgttgaacctttgttttgatagagcagttctgaaacacactttttgtaaaatctgcaagaggatatttggatagctttgaggatttcgttggaaacgggaatgtcttcatgtaaactctacacagaagcattctcagaaactgctttgggatgtttcaattgaagtcccagtgttgaacattcccattcatagagcaggtttgaaacactctttttgtactatctggaagtggacatttggagcgctttcaggtctacggtgaaaaaggagatatcttccaataaaaactagatagaagcaatgtcagaacttttttcatgatgtatctactcagctaacagagttgaacctttcttttgagagagcagttttgaaacactctttttgtggaatatgcaagtgggtattaggccagcttggaggatttcgttggaaacgggaatacgtataaaaagcagacagcagcattgtcagaaactactttgtgatgtttgcattcaagtcacagaattgaacactccctttcacagagcaggtttgaaacactctttttgaagtgtctgtaagtgaacatttggattgctttcaggcctaaggtgaaaaaggaaatatcttcccataaaaactagacagaagcattctcagaaacttgtttgtgatgtgtgccctctactgacagagttgaacctttctttgcaaagagcagttttgaaacactctttttgtagaatctgcaagaggatatttggatagctttgaggatttcctgggaaacgggaatgtcttcagataaactctagacagaagcattctcagaaacttctttgggatgtttcaattgaagtcacagtgttgaacattccctttcacagagcaggtttgaaacactctttttgtagtgtctataagtgaacatttggcgtgctttcaggcctaacgtgaaaaaggaaatatcttcccataaaaactagacagaagcattctcagaaacttgttcgtgatgtgtgccctctactgacagagttgaacctttctttgcaaagagcagctttgaaacactctttttgtagaatctgcaagaggatatttggatagcttggaggatttcgttggaaacgggtatgtcttcagataaactgctagacagaagcattctcagaaacttctttgggatgttgcattcaagtcacagagtagaacattcccattcatagagcagatttgaaacactctttttgtagtatctggaagtggacatttggagcgctttcaggcctatgttgaaaaaggaaatatcttcccataaaaactagacggaagcattctcagaaacttacttgtgatgtgtttgctcaactaacagaattgaaccatcgttttgaaggagcagttttgaaacactgttttcgtggaatctgcaagtggatatttggctagctttgaggatttcgttggaaacgggattacatataaaaaggagacagcagcattctcagaaacttctttgtgatgtctgcattcaagtcacagagttgagcattccctttcatagagcaggttggaaacactctttttgtagtatctggatgaggacatttggagcgctttcaggcgtatggtgaaaaaggaaatatcttcccgtaaaaactagacagaagcattctcagaattttatttgtgatgtgtgccctcaactaacagagttgaacctttcttttgatagagcagttttgaaacactctttttgtaaaatctgcaagaggatatttggatagctttgaggatttcgttgcaaacgggaatggcttcatataaactctagacagaagcattctcagaaacttcgttgggatgtttcgattgaagtcccagtgttgaacattcccttttatagagcaggttggaaacactctttctgcattccctggaagtggacatttggagcgctttcaggacgacggtgaaaatggaaatatcttccaagaaaatctagatagaagcaacgtcagaaacttttctgtgatggatctactcagctaacagagttgaacctttcttttgagagagcagttttgcaacactctttttgtggaatatgcaagtggatattagggcagctttgaggatttcgttggaaacgggaatacatgtaaaaagcagacagcagcattctcagaaacttctttgtgatgtttgcattgaagtcacagagttgaacattccctttgagagagcaggtttgaaacacgccttttgtcatatctggaagtgtccattcggagcgcattcaggcttgtgttgaaaaaggaaatatcctcccataaaaactagacagaagcattctcagaaacttatctgtgatgtatgtactcaactaacagaactaaaccatcgttttgaaggagcagttttgaaacactctttttgcggaatctgcaagtggatatttggctagctgggaggatttcgttggaaacgggattacatacaaaaagcagacagcagcattctcagaaacttctttgtgatgtttgcattcaagtcacagagttgaacattccctttcatagagcaggtttgaaacactctttttgtagtatctggatgtggacatttggatcgctttcaggcctatggtgaaaaaggaaatatcttcccatgaaaactagacagaagcattctcagaaacttatttgtgatgtgtgccctcaactgacagtgttgaacctttgttttgatagagcagttctgaaacacactttttgtaaaatctgcaagaggatatttggatagctttgaggatttcgttggaaacgggaatgtcttcatgtaaactctagacagaagcattctcagaaactgctttgggatgtttcaattgaagtcccagtgttgaacattccctttcatagagcaggtttgaaaccctctttttgtactatctggaagtggacatttggagcgctttcaggtctacggtgaaaaaggagatatcttccaataaaaactagatagaagcaatgtcagaacttttttcatgatgtatctactcagcaaacagagttgaacctttcttttgagggagcagttttgaaacactatttttgtggaatatgcaagtgggtattaggccagcttggaggatttcgttggaaacgggaatacgtataaaaagcagacagcagcattgtcagaaactactttgtgatgtttgcattcaagtcacagaattgaacactccctttcacagagcaggtttgaaactctctttttgtagtgtctataagtgaacatttggcgtgctttcaggcgtaacgtgaaaaaggaaatatcttcccataaaaactagacagaagcattctcagaaacttgttcttgatgtgtgccctctactgacagagttgaacctttctttgcaaagagcagttttgaaacactctttttgtagaatctgcaagaggatatttggatagctttgaggatttcttgggaaacgggaatgtcttcagataaactctagacagaagcattctcagaaacttctttgggatgtttcaattgaagtcacagtgttgaacattccctttcacagagcaggtttgaaacactctttttgtagtgtctataagtgaacatttggcgtgctttcaggcgtaacgtgaaaaaggaaatatcttcccataaaaactagacagaagcattctcagaaacttgttcttgatgtgtcccctctactgacagagttgaacctttctttgcaaagagcagctttgaaacactctttttgtagaatctgcaagaggatatttggatagcttggaggatttcgttggaaacgggtatgtcttcagataaactctagacagaagcattctcagaaacttctttgggatgttgcattcaagtcacagagtagaacattcccattcatagagcagatttgaaacactctttttgtagtatctggaagtggacatttggagcgctttcaggcctatgttgaaaaaggaaatatccttcccataaaaactagacggaagcattctcagtaaacttaattgtgatgtgtttgctcaactaacaggattgaaccatcgttttgaaggagcagttttgaaacactgttttcgtggaatctgcaagtggatatttggctagctttgaggatttcgttggaaacgggattacatataaaaaggagacagcagcattttcagaaactactttgtgatgtttgcattcaagtcacagagttgaacattccctttcatagagcaggtttgaaacactctttttgtagtatctggatgtggacatttggatcgctttcaggcctatggtgaaaaaggaaatatcttcccatgaaaactagacagaagcattctcagaaacttatttgtgatgtgtgtactcaactaacagaattgaaccatcgttttgaaagagcagttttgaaacactccttttgtggaatctgcaagtggatatttgtctagctttgaggatttcgttggaaacgggattacatataaaaagcagacagcagcattctgagaaacttctttgtgatgtctgcattcaattcacagaagctgagcattccctttcatagagcaggttggaaacactctttttgtagtatctggatgtggacatttggttcgctttcaggcctatggtgaaaaaggaaatatcttcccatgaaaactagacagaagattctcagaaatttatttgtgatgtgtgccctcaactaacagagttgaacctttcttttgatagagcagttttgaaacactctttttgtaaaatctgcaagaggatatttggatagctttgaggatttcgttgcaaacgggaatggcttcatataaactctagacagaagcattctcagaaacttcgttgggatgtttcgattgaagtcccagtgttgaacattcccttttatagagcaggttggaaacactctttctgcattccctggaagtggacatttggagcgctttcaggacgacggtgaaaatggaaatatcttccaagaaaatctagatagaagcaacgtcagaaacttttatgtgatggatctactcagctaacagagttgaacctttcttttgagagagcagttttgcaacactctttttgtggaatatgcaagtggatattagggcagctttgaggatttcgttggaaacgggaatacatgtaaaaagcagacagcagcattctcagaaacttctttgtgatgtttgcattgaagtcacagagttgaacattccctttgaaagagcaggtttgaaacacgccttttgtcatatctggaagtgtccattcggagcgcattcaggcttgtgttgaaaaaggaaatatcctcccataaaaactagacagaagcattctcagaaacttatctgtgatgtatgtactcaactaacagaactaaaccatcgttttgaaggagcagttttgaaacactctttttgcggaatctgcaagtggatatttggctagctgggaggatttcgttggaaacgggattacatacaaaaagcagacagcagcattctcagaaacttctttgtgatgtttgcattcaagtcacagagttgaacattccctttcatagagcaggtttgaaacactctttttgtagtatctggatgtggacatttggatcgctttcaggcctatggtgaaaaaggaaatatcttcccatgaaaactagacagaagcattctcagaaacttatttgtgatgtgtgccctcaactgacagtgttgaacctttgttttgatagagcagttctgaaacacactttttgtaaaatctgcaagaggatatttggatagctttgaggatttcgttggaaacgggaatgtcttcatgtaaactctagacagaagcattctcagaaactgctttgggatgtttcaattgaagtcccagtgttgaacattcccattcatagagcaggtttgaaacactctttttgtactatctggaagtggacatttggagcgctttcaggtctacggtgaaaaaggagatatcttccaataaaaactagatagaagcaatgtcagaactttttacatgatgtatctactcagcaaacagagttgaacctttcttttgagagagcagttttgaaacactctttttgtggaatatgcaagtgggtattaggccagctaggaggatttcgttggaaacgggaatacgtataaaaagcagacagcagcattgtcagaaactactttgtgatgtttgcattcaagtcacagaattgaacactccctttcacagagcaggtttgaaacactctttttgtagtgtctgtaagtgaacatatggattgctttcaggcctaaggtgaaaaaggaaatatcttcccataaaaactagacagaagcattctcagaaacttgtttgtgatgtgtgccctctactgacagagttgaacctttctttgcaaagagcagttttgaaacactctttttgtagaatctgcaagaggatatttggatagctttgaggatttcttgggaaacgggaatgtcttcagataaactctagacagaagcattctcagaaacttctttgggatgtttcaattgaagtcacagtgttgaacattccctttcacagagcaggtttgaaacactctttttgtagtgtctataagtgaacatttggcgtgctttcaggcctaacgtgaaaaaggaaatatcttcccataaaaactagacagaagcattctcagaaacttgttcgtgatgtgtgccctctactgacagagttgaacctttctttgcaaagagcatctttgaaacactctttttgtagaatctgcaagaggatatttggatagcttggaggatttcgttggaaacgggtatgtcttcagataaactctagacagaagcattctcagaaacttctttgggatgttgcattcaagtcacagagtagaacattcccattcatagagcagatttcaaacactctttttgtagtatctggaagtggacatttggagcgctttcaggcctatgttgaaaaaggaaatatcttcccataaaaactagacggaagcattctcagaaacttatttgtgatgtgtttgctcaactaacaggattgaaccatcgttttgaaggagcagttttgaaacactgttttcgtggaatctgcaagtggatatttggctagctttgaggatttcgttggaaacgggattacatataaaaaggagacagcagcattctcagaaacttctttgtgatgtctgcattcaattcacagagttgagcattccctttcatagagcaggttggaaacactctttttgtagtatctggatgaggacatttggagcgctttcaggcgtatggtgaaaaaggaaatatcttcccgtaaaaactagacagaagcattctcagaagtttatttgtgatgtgtgccctcaactaacagagttgaacctttcttttgatagagcagttttgaaacactctttttgtaaaatctgcaagaggatatttggatagctttgaggatttcgttgcaaacgggaatggcttcatataaactcctagacagaagcattctcagaaacttcgttgggatgtttcgattgaagtcccagtgttgaacattcccttttatagagcaggttggaaacactctttctgcattccctggaagtggacatttggagcgctttcaggacgacggtgaaaatggaaatatcttccaagaaaatctagatagaagcaatgtcagaaacttttatctgatggatctactcagctaacagagttgaacctttcttttgagagagcagttttgcaacactctttttgtggaatatgcaagtggatattagggcagctttgaggatttcgttggaaacgggaatacatgtaaaaagcagacagcagcattctcagaaacttctttgtgatgtttgcattgaagtcacagcagttgaacattccctttgagagagcaggtttgaaacacgccttttgtcatatctggaagtgtccattcggagcgcattcaggcttgtgttgaaaaaggaaatatcctcccataaaaactagacagaagcattctcagaaacttatctgtgatgtatgtactcaactaacagaactaaaccatcgttttgaaggagcagttttgaaacactctttttgcggaatctgcaagtggatatttggctagctgggaggatttcgttggaaacgggattacatacaaaaagcagacagcagcattctcagaaacttctttgtgatgtttgcattcaagtcacagagttgaacattccctttcatagagcaggtttgaaacactctttttgtagtatctggatgtggacatttggatcgctttcaggcctatggtgaaaaaggaaatatcttcccatgaaaactagacagaagcattctcagaaacttatttgtgatgtgtgccctcaactgacagtgttgaacctttgttttgatagagcagttctgaaacacactttttgtaaaatctgcaagaggatatttggatagctttgaggatttcgttggaaacgggaatgtcttcatgtaaactctagacagaagcattctcagaaactgctttgggatgtttcaattgaagtcccagtgttgaacattccctttcatagagcaggtttgaaacactctttttgtactatctggaagtggacatttggagcgctttcaggtctacggtgaaaaaggagatatcttccaataaaaactagatagaaacaatgtcagaacttttttcatgatgtatctactcagcaaacagagttgaactttttttgagagagcagttttgaaacactctttttgtggaatatgcaagtgggtattaggccagcttggaggattttgttggaaacgggaatacgtattaaaagcagacagcagcattgtcagaaactactttgtgatgtttgcattcaagtcacagaattgaacactccctttcacagagcaggtttgaaaccctctttttgtagtgtctgtaagtgaacatttggattgctttcaggcctaaggtgaaaaaggaaatatcttcccataaaaactagacagaagcattctcagaaacttgtttgtgatgtgtgccctctactgacagagttgaacctttctttgcaaagagcagttttgaaacactctttttgtagaatctgcaagaggatatttggatagctttgaggatttcttgggaaacgggaatgtcttcagataaactctagacagaagcattctcagaaacttctttgggatgtttcaattgaagtcacagtgttgaacattccctttcacagagcaggttttaaacactctttttgtagtgtctataagtgaacatttggcgtgctttcaggcctaacgtgaaaaaggaaatatcttcccataaaaactagacagaagcattctcagaaacttgttcgtgatgtgtgccctctactgacagagttgaacctttctttgcaaagagcagctttgaaacactctttttgtagaatctgcaagaggatatttggatagctttgaggatttcgttggaaacgggtatgtcttcagataaactctagacagaagcattctcagaaacttctttgagatattgcattcaagtcacagagtagaacattcccattcatagagcagatttgaaacactctttttgtagtatctggaagtggacatttggagcgctttcaggcctatgttgaaaaaggaaatatcttcccataaaaactagacggaagcattctcagaaacttatttgtgatgtgtttgctcaactaacaggattgaaccatcgttttgaaggagcagttttgaaacactgttttcgtggaatctgcaagtggatatttggctagctttgaggatttcgttggaaacgggattacatataaaaaggagacagcagcattctcagaaacttctttgtgatgtctgcattcaagtcacagagttgagcattccctttcatagagcaggttggaaacactctttttgtagtatctggatgaggacatttggagcgctttcaggcgtatggtgaaaaaggaaatatcttcccgtaaaaactagacagaagcattctcagaaatttatttgtgatgtgtgccctcaactaacagagttgaacctttcttttgatagagcagttttgaaacactctttttgtaaaatctgcaagaggatatttggatagctttgaggatttcgttgcaaacgggaatggcttcatataaactctagacagaagcattctcagaaacttcgttgggatgtttcgattgaagtcccagtgttgaacattcccttttatagagcaggttggaaacactctttctgcattccctggaagtggacatttggagcgctttcaggacgacggtgaaaatggaaatatcttccaagaaaatctagatagaagcaacgtcagaaacttttctgtgatggatctactcagctaacagagttgaacctttcttttgagagagcagttttgcaacactctttttgtggaatatgcaagtggatattagggcagctttgaggatttcgttggaaacgggaatacatgtaaaaagcagacagcagcattctcagaaacttctttgtgatgtttgcattgaagtcacagagttgaacattccctttgagagagcaggtttgaaacacgccttttgtcatatctggaagtgtccattcggagcgcattcaggcttgtgttgaaaaaggaaatatcctcccataaaaactagacagaagcattctcagaaacttatctgtgatgtatgtactcaactaacagaactaaaccatcgttttgaaggagcagttttgaaacactctttttgcggaatctgcaagtggatatttggctagctgggaggatttcgttggaaacgggattacatacaaaaagcagacagcagcattctcagaaacttctttgtgatgtttgcattcaagtcacaagagttgaacattccctttcatagagcaggtttgaaacactctttttgtagtatctggatgtggacatttggatcgctttcaggcctatggtgaaaaaggaaatatcttcccatgaaaactagacagaagcattctcagaaacttatttgtgatgtgtgccctcatctgacagtgttgaacctttgttttgatagagcagttctgaaacacactttttgtaaaatctgcaagaggatatttggatagctttgaggatttcgttggaaacgggaatgtcttcatgtaaactctacacagaagcattctcagaaactgctttgggatgtttcaattgaagtcccagtgttgaacattccctttcatagagcaggtttgaaacactctttttgtactatctggaagtggacatttggagcgctttcaggtctacggtgaaaaaggagatatcttccaataaaaactagatagaagcaatgtcagaacttttttcatgatgtatctactcagcaaacagagttgaacctttcttttgagagagcagttttgaaacactctttttgtggaatatgcaagtgggtattaggccagcttggaggatttcgttggaaacgggaatacgtataaaaagcagacagcagcattgtcagaaactactttgtgatgtttgcattcaagtcacagaattgaacactccctttcacagagcaggtttgaaacactctttttgtagtgtctgtaagtgaacatttggattgatttcaggcctaaggtgaaaaaggaaatatcttcccataaaaactagacagaagcattctcagaaacttgtttgtgatgtgtgccctctactgacagagttgaacctttctttgcaaagagcagttttgaaacactctttttgtagaatctgcaagaggatatttggatagctttgaggatttcttgggaaacgggaatgtcttcagataaactctagacagaagcattctcagaaacttctttgggatgtttcaattgaagtcacagtgttgaacattccctttcacagagcaggtttgaaacactctttttgtagtgtctataagtgaacatttggcgtgctttcaggcgtaacgtgaaaaaggaaatatcttcccataaaaactagacggaagcattcttagaaacttacttgtgatgtgtttgctcaactaacagaattgaaccatcgttttgaaggagcagttttgaaacactgttttcgtggaatctgcaagtggatatttggctagctttgaggatttcgttggaaacgggattacatataaaaaggagacagcagcattctcagaaacttctttgtgatgtctgcattcaagtcacagagttgagcattccctttcatagagcaggttggaaacactctttttgtagtatctggatgaggacatttggagcgctttcaggcgtatggtgaaaaaggaaatatcttcccgtaaaaactagacagaagcattctcagaaatttatttgtgatgtgtgccttcaactaacagagttgaacctttcttttgatagagcagttttgaaacactctttttgtaaaatctgcaagaggatatttggatagctttgaggatttcgttgcaaacgggaatggcttcatataaactctagacagaagcattctcagaaacttcgttgggatgtttcgattgaagtcccagtgttgaacattcccttttatagagcaggttggaaacactctttctgcattccctggaagtggacatttggagcgctttcaggacgacggtgaaaatggaaatatcttccaagaaaatctagatagaagcaacgtcagaaacttttctgtgatggatgtactcagctaacagagttgaacctttcttttgagagagcagttttgcaacactctttttgtggaatatgcaagtggatattagggcagctttgaggatttcgttggaaacgggaatacatgtaaaaagcagacagcagcattctcagaaacttctttgtgatgtttgcattgaagtcacagagttgaacattccctttgagagagcaggtttgaaacacgccttttgtcatatctggaagtgtccattcggagcgcattcaggcttgtgttgaaaaaggaaatatcctcccataaaaactagacagaagcattctcagaaacttatctgtgatgtatgtactcaactaacagaactaaaccatcgttttgaaggagcagttttgaaacactctttttgcggaatctgcaagtggatatttggctagctgggaggatttcgttggaaacgggattacatacaaaaagcagacagcagcattctcagaaacttctttgtgatgttagcattcaagtcacagagttgaacattccctttcatagagcaggtttgaaacactctttttgtagtatctggatgtggacatttggatcgctttcaggcctatggtgaaaaaggaaatatcttcccatgaaaactagacagaagcattctcagaaatttatttgtgatgtgtgccctcaactaacagagttgaacctttcttttgatagagcagttttgaaacactctttttgtaaaatctgcaagaggatatttggatagctttgaggatttcgttgcaaacgggaatggcttcatataaactctagacagaagcattctcagaaacttcgttgggatgtttcgattgaagtcccagtgttgaacattcccttttatagagcaggttggaaacactctttctgcattccctggaagtggacatttggagcgctttcaggacgacggtgaaaatggaaatatcttccaagaaaatctagatagaagcaatgtcagaaacttttatgtgatggatctactcagctaacagagttgaacctttcttttgagagagcagttttgcaacactctttttgtggaatatgcaagtggatattagggcagctttgaggatttcgttggaaacgggaatacatgtaaaaagcagacagcagcattctcagaaacttctttgtgatgtttgcattgaagtcacagagttgaacattccctttgagagagcaggtttgaaacacgccttttgtcatatctggaagtgtccattcggagcgcattcaggcttgtgttgaaaaaggaaatatcctcccataaaaactagacagaagcattctcagaaacttatctgtgatgtatgtactcaactaacagaactaaaccatcgttttgaaggagcagttttgaaacactctttttgcggaatctgcaagtggatatttggctagctgggaggatttcgttggaaacgggattacatacaaaaagcagacagcagcattctcagaaacttctttgtgatgtttgcattcaagtcacagagttgaacattccctttcatagagcaggtttgaaacactctttttgtagtatctggatgtggacatttggatcgctttcaggcctatggtgaaaaaggaaatatcttcccatgaaaactagacagaagcattctcagaaacttatttgtgatgtgtgccctcaactgacagtgttgaacctttgttttgatagagcagttctgaaacacactttttgtaaaatctgcaagaggatatttggatagctttgaggatttcgttggaaacgggaatgtcttcatgtaaactctacacagaagcattctcagaaactgctttgggatgtttcaattgaagtcccagtgttgaacattcccattcatagagcaggtttgaaacactctttttgtactatctggaagtggacatttggagcgctttcaggtctacggtgaaaaaggagatatcttccaataaaaactagatagaagcaatgtcagaacttttttcatgatgtatctactcagctaacagagttgaacctttcttttgagagagcagttttgaaacactctttttgtggaatatgcaagtgggtattaggccagcttggaggatttcgttggaaacgggaatacgtataaaaagcagacagcagcattgtcagaaactactttgtgatgtttgcattcaagtcacagaattgaacactccctttcacagagcaggtttgaaacactctttttgtagtgtctgtaagtgaacatttggattgctttcaggcctaaggtgaaaaaggaaatatcttcccataaaaactagacagaagcattctcagaaacttgtttgtgatgtgtgccctctactgacagagttgaacctttctttgcaaagagcagttttgaaacactctttttgtagaatctgcaagaggatatttggatagctttgaggatttcctgggaaacgggaatgtcttcagataaactctagacagaagcattctcagaaacttctttgggatgtttcaattgaagtcacagtgttgaacattccctttcacagagcaggtttgaaacactctttttgtagtgtctataagtgaacatttggcgtgctttcaggcctaacgtgaaaaaggaaatatcttcccataaaaactagacagaagcattctcagaaacttgttcatgatgtgtgccctctactgacagagttgaacctttctttgcaaagagcagctttgaaacactctttttgtagaatctgcaagaggatatttggatagcttggaggatttcgttggaaacgggtatgtcttcagataaactctagacagaagcattctcagaaacttctttgggatgttgcattcaagtcacagagtagaacattcccattcatagagcagatttgaaacactctttttgtagtatctggaagtggacatttggagcgctttcaggcctatgttgaaaaaggaaatatcttcccataaaaactagacggaagcattctcagaaacttatttgtgatgtgtttgctcaactaacaggattgaaccatcgttttgaaggagcagttttgaaacactgttttcatggaatctgcaagtggatatttggctagctttgaggatttcgttggaaacgggattacatataaaaaggagacagcagcattctcagaaacttctttgtgatgtctgcattcaattcacagagttgagcattccctttcatagagcaggttggaaacactctttttgtagtatctggatgaggacatttggagcgctttcaggcgtatggtgaaaaaggaaatatcttcccgtaaaaactagacagaagcattctcagaagtttatttgtgatgtgtgccctcaactaacagagttgaacctttcttttgatagagcagttttgaaacactctttttgtaaaatctgcaagaggatatttggatagctttgaggatttcgttgcaaacgggaatggcttcatataaactctagacagaagcattctcagaaacttcgttgggatgtttcgattgaagtcccagtgttgaacattcccttttatagagcaggttggaaacactctttctgcattccctggaagtggacatttggagcgctttcaggacgacggtgaaaatggaaatatcttccaagaaaatctagatagaagcaatgtcagaaacttttatgtgatggatctactcagctaacagagttgaacctttcttttgagagagcagttttgcaacactctttttgtggaatatgcaagtggatattagggcagctttgaggatttcgttggaaacgggaatacatgtaaaaagcagacagcagcattctcagaaacttctttgtgatgtttgcattgaagtcacagagttgaacattccctttgagagagcaggtttgaaacacgccttttgtcatatctggaagtgtccattcggagcgcattcaggcttgtgttgaaaaaggaaatatcctcccataaaaactagacagaagcattctcagaaacttatctgtgatgtatgtactcaactaacagaactaaaccatccttttgaaggagcagttttgaaacactctttttgcggaatctgcaagtggatatttggctagctgggaggatttcgttggaaacgggattacatacaaaaagcagacagcagcattctcagaaacttctttgtgatgtttgcattcaagtcacagagttgaacattccctttcatagagcaggtttgaaacactctttttgtagtatctggatgtggacatttggatcgctttcaggcctatggtgaaaaaggaaatatcttcccatgaaaactagacagaagcattctcagaaacttatttgtgatgtgtgccctcaactgacagtgttgaacctttgttttgatagagcagttctgaaacacactttttgtaaaatctgcaagaggatatttggatagctttgaggatttcgttggaaacgggaatgtcttcatgtaaactctacacagaagcattctcagaaactgctttgggatgtttcaattgaagtcccagtgttgaacattcccattcatagagcaggtttgaaacactctttttgtactatctggaagtggacatttggagcgctttcaggtctacggtgaaaaaggagatatcttccaataaaaactagatagaagcaatgtcagaacttttttcatgatgtatctactcagcaaacagagttgaacctttcttttgagggagcagttttgaaacactatttttgtggaatatgcaagtgggtattaggccagcttggaggatttcgttggaaacgggaatacgtataaaaagcagacagcagcattgtcagaaactactttgtgatgtttgcattcaagtcacagaattgaacactccctttcacagagcaggtttgaaacactctttttgtagtgtctgtaagtgtacatttggattgctttcaggcctaaggtgaaaaaggaaatatcttcccataaaaactagacagaaagcattctcagcaaacttgtttgtgatgtgtgccctctactgacagagttgaacctttctttgcaaagagcagttttgaaacactctttttgtagaatctgcaagaggatatttggatagctttgaggatttcttgggaaacgggaatgtcttcagataaactctagacagaagcattctcagaaacttctttgggatgtttcaattgaagtcacagtgttgaacattccttttcacagagcaggtttgaaacactctttttgtagtgtctataagtgaacatttggcgtgctttcaggcctaacgtgaaaaaggaaatatcttcccataaaaactagacagaagcattctcagaaacttgttcgtgatgtgtgccctctactgacagagttgaacctttctttgcaaagagcagctttgaaacactctttttgtagaatctgcaagaggatatttggatagctttgaggatttcgttggaaacgggtatgtcttcagataaactctagacagaagcattctcagaaacttctttgggatgttgcattcaagtcacagagtagaacattcccattcatagagcagatttgaaacactcttttgtagtatctggaagtggacatttggaacgctttcaggcctatgttgaaaaaggatatatcttcccataaaaactagacggaagcattctcagaaacttacttgtgatgtgtttgctcaactaacagaattgaaccatcgttttgaaggagcagttttgaaacactgttttcgtggaatctgcaagtggatatttggctagctttgaggatttcgttggaaacgggattacatataaaaaggagacagcagcattctcagaaacttctttgtgatgtctgcattcaattcacagagttgagcattccctttcatagagcaggttggaaacactctttttgtagtatctggatgaggacatttggagcgctttcaggcctatggtgaaaaaggaaatatcttcccgtaaaaactagacagaagcattctcagaaatttatttgtgatgtgtgccctcaactaacagagttgaacctttcttttgatagagcagttttgaaacactctttttgtaaaatctgcaagaggatatttggatagctttgaggatttcattgcaaacgggaatggcttcatataaactctagacagaagcattctcagaaacttcgttgggatgtttcgattgaagtcccagtgttgaacattcccttttatagagcaggttggaaacactctttctgcattccctggaagtggacatttggagcgctttcaggacgacggtgaaaatggaaatatcttccaataaaatctagatagaagcaacgtcagaaacttttatgtgatggatctactcagctaacagagttgaacctttcttttgagagagcagttttgcaacactctttttgtggaatatgcaagtggatattagggcagctttgaggatttcgttggaaacgggaatacatgtaaaaagcagacagcagcattctcagaaacttctttgtgatgtttgcattgaagtcacagagttgaacattccctttgagagagcaggtttgaaacacgccttttgtcatatctggaagtgtccattcggagcgcattcaggcttgtgttgaaaaaggaaatatcctcccataaaaactagacagaagcattctcagaaacttatctgtgatgtatgtactcaactaacagaactaaaccatcgttttgaaggagcagttttgaaacactctttttgcggaatctgcaagtggatatttggctagctgggaggatttcgttggaaacgggattacatacaaaaagcagacagcagcattctcagaaacttctttgtgatgtttgcattcaagtcacagagttgaacattccctttcatagagcaggtttgaaacactctttttgtagtatctggatgtggacatttggatcgctttcaggcctatggtgaaaaaggaaatatcttcccatgaaaactagacagaagcattctcagaaacttatttgcgatgtgtgccctcaactgacagtgttgaacctttgttttgatagagcagttctgaaacacactttttgtaaaatctgcaagaggatatttggatagctttgaggatttcgttggaaacgggaatgtcttcatgtaaactctggacagaagcattctcagaaactgctttgggatgtttcaattgaagtcccagtgttgaacattcccattcatagagcaggtttgaaacactctttttgtactatctggaagtggacatttggagcgctttcaggtctacggtgaaaaaggagatatcttccaataaaaactagatagaagcaatgtcagaacttttttcatgatgtatctactcagcaaacagagttgaacctttcttttgagagagcagttttgaaacactctttttgtggaatatgcaagtgggtattaggccagcttggaggatttcgttggaaacgggaatacgtataaaaagcagacagccagcattgtcagaaactactttgtgatgtttgcattcaagtcacagaattgaacactccctttcacagagcaggtttgaaacactctttttgtagtgtctgtaagtgaacatttggattgctttcaggcctaaggtgaaaaaggaaatatcttcccataaaaactagacagagcattctcagaaacttgtttgtgatgtgtgccctctactgacagagttgaacctttctttgcaaagagcagttttgaaacactctttttgtagaatctgcaagaggatatttggatagctttgaagatttcttgggaaacgggaatgtcttcagataaactctagacagaagcattctcagaaacttctttgggatgtttcaattgaagtcacagtgttgaacattccctttcacagagcaggtttgaaacactctttttgtagtgtctataagtgaacatttggcgtgctttcaggcctaacgtgaaaaaggaaatatcttcccataaaaactagacagaagcattctcagaaacttgttcgtgatgtgtgccctctacagacagagttgaacatttctttgcaaagagcagctttgaaacacactttttgtagaatctgcaagaggatatttggatagcttggaggatttcgttggaaacgagtatgtcttcagataaactctagacagaagcattctcagaaacttctttgggatgttgcattcaagtcacagagtagaacattcccattcatagagcagatttgaaacactctttttgtagtatctggaagtggacatttggagcgctttcaggcctatgttgaaaaaggaaatatcttcccataaaaactagacggaagcattctcagaaacttacttgtgatgtgtttgctcaactaacagaattgaaccatcgttttgaaggagcagttttgaaacactgttttcgtggaatctgcaagtggatatttggctagctttgaggatttcgttggaaacgggattacatataaaaaggagacagccagcattctcagtaaacttctttgtgatgtctgcattcaattcacagcagttgagcattccctttcatagagcaggttggaaacactctttttgtagtatctggatgaggacatttggagcgctttcaggcgtatggtgaaaaaggaaatatcttcccgtaaaaactagacagaagcattctcagaaatttatttgtgatgtgtgccctcaactaacagagttgaacctttcttttgatagagcagttttgaaacactctttttgtaaaatctgcaagaggatatttggatagctttgaggatttcgttgcaaacgggaatggcttcatataaactctagacagaagcattctcagaaacttcgttgggatgtttcgattgaagtcccagtgttgaacattcccttttatagagcaggttggaaacactctttctgcattccctggaagtggacatttggagcgctttcaggacgacggtgaaaatggaaatatcttccaagaaaatctagatagaagcaacgtcagaaacttttctgtgatggatctactcagctaacagagttgaacctttcttttgagagagcagttttgcaacactctttttgtggaatatgcaagtggatattagggcagctttgaggatttcgttggaaacgggaatacatgtaaaaagcagacagcagcattctcagaaacttctttgtgatgtttgcattgaagtcacagagttgaacattccctttgagagagcaggtttgaaacacgccttttgtcatatctggaagtgtccattcggagcgcattcaggcttgtgttgaaaaaggaaatatcctcccataaaaactagacagaagcattctcagaaacatatctgtgatgtatgtactcaactaacagaactaaaccatcgttttgaaggagcagttttgaaacactctttttgcggaatctgcaagtggatatttggctagctgggaggatttcgttggaaacgggattacatacaaaaagcagacagcagcattctcagaaacttctttgtgatgtttgcattcaagtcacagagttgaacattccctttcatagagcaggtttgaaacactctttttgtagtatctggatgtggacatttggatcgctttcaggcctatggtgaaaaaggaaatatcttcccatgaaaactagacagaagcattctcagaaacttatttgtgatgtgtgccctcaactgacagtgttgaacctttgttttgatagagcagttctgaaaaacactttttgtaaaatctgcaagaggatatttggatagctttgaggatttcgttggaaacgggaatgtcttcatgtaaactctacacagaagcattctcagaaactgctttgggatgtttcaattgaagtcccagtgttgaacattcccattcatagagcaggtttgaaacacactttttgtactatctggaagtggacatttggagcgctttcaggtctacggtgaaaaaggagatatcttccaataaaaactagatagaagcaatgtcagaacttttttcatgatgtatctactcagctaacagagttgaacctttcttttgagagagcagttttgaaacactctttttgtggaatatgcaagtgggtattaggccagcttggaggatttcgttggaaacgggaatacgtataaaaagcagacagcagcattgtcagaaactactttgtgatgtttgcattcaagtcacagaattgaacactccctttcacagagcaggtttgaaacactctttttgtagtgtctgtaagtgaacatatggattgctttcaggcctaaggtgaaaaaggaaatatcttcccataaaaactagacagaagcattctcagaaacttgtttgtgatgtgtgccctctactgacagagttgaacctttctttgcaaagagcagttttgaaacactctttttgtagaatctgcaagaggatatttggatagctttgaagatttcttgggaaacgggaatgtcttcagataaactctagacagaagcattctcagaaacttctttgggatgtttcaattgaagtcacagtgttgaacattccctttcacagagcaggtttgaaacactctttttgtagtgtctataagtgaacatttggcgtgctttcaggcgtaacgtgaaaaaggaaatatcttcccataaaaaccagacagaagcattctcagaaacttgttcgtgatgtgtgccctctactgacagagttgaacctttctttgcaaagagcagctttgaaacacactttttgtagaatctgcaagaggatatttggatagcttggaggatttcgttggaaacgggtatgtcttcagataaactctagacagaagcattctcagaaacttctttgggatgttgcattcaagtcacagagtagaacattcccattcatagagcagatttgaaacactctttttgtagtatctggaagtggacatttggagcgctttcaggcctatgttgaaaaaggaaatatcttcccataaaaactagacggaagcattctcagaaacttatttgtgatgtgtttgctcaactaacaggattgaaccatcgttttgaaggagcagttttgaaacactgttttcatggaatctgcaagtggatatttggctagctttgaggatttcgttggaaacgggattacatataaaaaggagacagcagcattctcagcaaacttctttgtgatgtctgcattcaattcacagagttgagcattccctttcatagagcaggttggaaacactctttttgtagtatctggatgaggacatttggagcgctttcaggcctatggtgaaaaaggaaatatcttcccgtaaaaactagacagaagcattctcagaagtttatttgtgatgtgtgccctcaactaacagagttgaacctttcttttgatagagcagttttgaaacactctttttgtaaaatctgcaagaggatatttggatagctttgaggatttcgttgcaaacgggaatggcttcatataaactctagacagaagcattctcagaaacttcgttgggatgtttcgattgaagtcccagtgttgaacattcccttttatagagcaggttggaaacactctttctgcattccctggaagtggacatttggagcgctttcaggacgacggtgaaaatggaaatatcttccaagaaaatctagatagaagcaacgtcagaaacttttctgtgatggatctactcagctaacagagttgaacctttcttttgagagagcagttttgcaacactctttttgtggaatatgcaagtggatattagggcagctttgaggatttcgttggaaacgggaatacatgtaaaaagcagacagcagcattctcagaaacttctttgtgatgtttgcattgaagtcacagagttgaacattccctttgagagagcaggtttgaaacacgccttttgtcatatctggaagtgtccattcggagcgcattcaggcttgtgttgaaaaaggaaatatcctcccataaaaactagacagaagcattctcagaaacttatctgtgatgtatgtactcaactaacagaactaaaccatcgttttgaaggagcagttttgaaacactctttttgcggaatctgcaagtggatatttggctagctgggaggatttcgttggaaacgggattacatacaaaaagcagacagcagcattctcagaaacttctttgtgatgtttgcattcaagtcacagagttgaacattccctttcatagagcaggtttgaaacactctttttgtagtatctggatgtggacatttggatcgctttcaggcctatggtgaaaaaggaaatatcttcccatgaaaactagacagaagcattctcagaaacttatttgtgatgtgtgccctcaactgacagtgttgaacctttgttttgatagagcagttctgaaacacactttttgtaaaatctgcaagaggatatttggatagctttgaggatttcgttggaaacgggaatgtcttcatgtaaactctacacagaagcattctcagaaactgctttgggatgtttcaattgaagtcccagtgttgaacattcccattcatagagcaggtttgaaacactctttttgtactatctggaagtggacatttggagcgctttcaggtctacggtgaaaaaggagatatcttccaataaaaactagatagaagcaatgtcagaacttttttcatgatgtatctactcagcaaacagagttgaacctttcttttgagagagcagttttgaaacactctttttgtggaatatgaaagtgggtattaggccagcttggaggatttcgttggaaacgggaatacgtataaaaagcagacagcagcattgtcagaaactactttgtgatgtttgcattcaagtcacagaattgaacactccctttcacagagcaggtttgaaacactctttttgtagtgtctgtaagtgaacatttggattgctttcaggcctaaggtgaaaaaggaaatatcttcccataaaaactagacagaagcattctcagaaacttgtttgtgatgtgtgccctctactgacagagttgaacctttctttgcaaagagcagttttgaaacactctttttgtagaatctgcaagaggatatttggatagctttgaggatttcttgggaaacgggaatgtcttcagataaactctagacagaagcattctcagaaacttctttgggatgtttcaattgaagtcacagtgttgaacattccctttcacagagcaggtttgaaacactctttttgtagtgtctataagtgaacatttggcgtgctttcaggcctaacgtgaaaaaggaaatatcttcccataaaaactagacagaagcattctcagaaacttgttcgtgatgtgtgccctctactgacagagttgaacctttctttgcaaagagcagctttgaaacacactttttgtagaatctgcaagaggatatttggatagctttgaggatttcgttggaaacgggtatgtcttcagataaactctagacagaagcattctcagaaacttctttgggatgttgcattcaagtcacagagtagaacattcccattcatagagcagatttgaaacactctttttgtagtatctggaagtggacatttggagcgctttcaggcctatgttgaaaaaggaaatatcttcccataaaaactagacggaagcattctcagaaacttatttgtgatgtgtttgctcaactaacaggattgaaccatcgttttgaaggagcagttttgaaacactgttttcgtggaatctgcaagtggatatttggctagctttgaggatttcgttggaaacgggattacatatacaaaggagacagcagcattctcagaaacttctttgtgatgtctgcattcaattcacagagttgagcattccctttcatagagcaggttggaaacactctttttgtagtatctggatgaggacatttggagcgctttcaggcgtatggtgagaaaggaaatatcttcccgtaaaaactagacagaagcattctcagaagtttatttgtgatgtgtgccctcaactaacagagttgaacctttcttttgatagagcagttttgaaacactctttttgtaaaatctgcaagaggatatttggatagctttgaggatttcgttgcaaacgggaatggcttcatataaactctagacagaagcattctcagaaacttcgttgggatgtttcgattgaagtcccagtgttgaacattcccttttatagagcaggttggaaacactctttctgcattccctggaagtggacatttggagcgctttcaggacgacggtgaaaatggaaatatcttccaagaaaatctagatagaagcaatgtcagaaacttttatgtgatggatctactcagctaacagagttgaacctttcttttgagagagcagttttgcaacactctttttgtggaatatgcaagtggatattagggcagctttgaggatttcgttggaaacgggaatacatgtaaaaagcagacagcagcattctcagaaacttctttgtgatgtttgcattgaagtcacagagttgaacattccctttgagagagcaggtttgaaacacgccttttgtcatatctggaagtgtccattcggagcgcattcaggcttgtgttgaaaaaggaaatatcctcccataaaaactagacagaagcattctcagaaacttatctgtgatgtatgtactcaactaacagaactaaaccaaccttttgaaggagcagttttgaaacactctttttgcggaatctgcaagtggatatttggctagctgggaggatttcgttggaaacgggattacatacaaaaagcagacagcagcattctcagaaacttctttgtgatgtttgcattcaagtcacagagttgaacattccctttcatagagcaggtttgaaacactctttttgtagtatctggatgtggacatttggatcgctttcaggcctatggtgaaaaaggaaatatcttcccatgaaaactagacagaagcattctcagaaacttatttgtgatgtgtgccctcaactgacagtgttgaacctttgttttgatagagcagttctgaaacacactttttgtaaaatctgcaagaggatatttggatagctttgaggatttcgttggaaacgggaatgtcttcatgtaaactctagacagaagcattctcagaaactgctttgggatgtttcaattgaagtcccagtgttgaacattcccattcatagagcaggtttgaaacactctttttgtactatctggaagtggacatttggagcgctttcaggtctacggtgaaaaaggagatatcttccaataaaaactagatagaagcaatgtcagaacttttttcatgatgtatctactcagcaaacagagttgaacctttcttttgagagagcagttttgacacagtctttgtggaatatgcaagtgggtattaggccagcttggaggatttcgttggaaacgggaatacgtataaaaagcagacagcagcattgtcagaaactactttgtgatgtttgcattcaagtcacagaattgaacactccctttcacagagcaggtttgaaacactctttttgtagtgtctgtaagtgaacatttggattgctttcaggcctaaggtgaaaaaggaaatatcttcccataaaaactagacagaagcattctcagaaacttgtttgtgatgtgtgccctctactgacagagttgaacctttctttgcaaagagcagttttgaaacactctttttgtagaatctgcaagaggatatttggatagctttgaggatttcttgggaaacgggaatgtcttcagataaactctagacagaagcattctcagaaacttctttgggatgtttcaattgaagtcacagtgttgaacattccctttcacagagcaggtttgaaacactctttttgtagtgtctataagtgaacatttggcatgctttcaggcctaacgtgaaaaaggaaatatcttcccataaaaactagacagaagcattctcagaaacttgttcgtgatgtgtgccctctactgacagagttgaacctttctttgcaaagagcagctttgaaacacactttttgtagaatctgcaagaggatatttggatagctttgaggatttcgttggaaacgggtatgtcttcagataaactctagacagaagcattctcagaaacttctttgggatgttgcattcaagtcacagagtagaacattcccattcatagagcagatttgaaacactctttttgtagtatctggaagtggacatttggagcgctttcaggcctatgttgaaaaaggaaatatcttcccataaaaactagacggaagcattctcagaaacttatttgtgatgtgtttgctcaactaacaggattgaaccatcgttttgaaggagcagttttgaaacactgttttcatggaatctgcaagtggatatttggctagctttgaggatttcgttggaaacgggattacatatacaaaggagacagcagcattctcagaaacttctttgtgatgtctgcattcaattcacagagttgagcattccctttcatagagcaggttggaaacactctttttgtagtatctggatgaggacatttggagcgctttcaggcgtatggtgaaaaaggaaatatcttcccgtaaaaactagacagaagcattctcagaagtttatttgtgatgtgtgccctcaactaacagagttgaacctttcttttgatagagcagttttgaaacactctttttgtaaaatctgcaagaggatatttggatagctttgaggatttcgttgcaaacgggaatggcttcatataaactctagacagaagcattctcagaaacttcgttgggatgtttcgattgaagtcccagtgttgaacattcccttttatagagcaggttggaaacactctttctgcattccctggaagtggacatttggagcgctttcaggacgacggtgaaaatggaaatatcttccaagaaaatctagatagaagcaatgtcagaaacttttatgtgatggatctactcagctaacagagttgaacctttcttttgagagagcagttttgcaacactctttttgtggaatatgcaagtggatattagggcagctttgaggatttcgttggaaacgggaatacatgtaaaaagcagacagcagcattctcagaaacttctttgtgatgtttgcattgaagtcacagagttgaacattccctttgagagagcaggtttgaaacacgccttttgtcatatctggaagtgtccattcggagcgcattcaggcttgtgttgaaaaaggaaatatcctcccataaaaactagacagaagcattctcagaaacttatctgtgatgtatgtactcaactaacagaactaaaccatcgttttgaaggagcagttttgaaacactctttttgcggaatctgcaagtggatatttggctagctgggaggatttcgttggaaacgggattacatacaaaaagcagacagcagcattctcagaaacttctttgtgatgtttgcattcaagtcacagagttgaacattccctttcatagagcaggtttgaaacactctttttgtagtatctggatgtggacatttggatcgctttcaggcctatggtgaaaaaggaaatatcttcccatgaaaactagacagaagcattctcagaaacttatttgtgatgtgtgccctcaactgacagtgttgaacctttgttttgatagagcagttctgaaacacactttttgtaaaatctgcaagaggatatttggatagctttgaggatttcgttggaaacgggaatgtcttcatgtaaactctagacagaagcattctcagaaactgctttgggatgtttcaattgaagtcccagtgttgaacattccctttcatagagcaggtttgaaacactctttttgtactatctggaagtggacatttggagcgctttcaggtctacggtgaaaaaggagatatcttccaataaaaactagatagaagcaatgtcagaacttttttcatgatgtatctactcagcaaacagagttgaacctttcttttgagagagcagttttgaaacactctttttgtggaatatgcaagtgggtattaggccagcttggaggatttcgttggaaacgggaatacgtataaaaagcagacagcagcattgtcagaaactactttgtgatgtttgcattcaagtcacagaattgaacactccctttcacagagcaggtttgaaacactctttttgtagtgtctgtaagtgaacatttggattgctttcaggcctaaggtgaaaaaggaaatatcttcccataaaaactagacagaagcattctcagaaacttgtttgtgatgtgtgccctctactgacagagttgaacctttctttgcaaagagcagttttgaaacactctttttgtagaatctgcaagaagatatttggatagatttgaggatttcttgggaaacgggaatgccttcagataaactctagacagaagcattctcagaaacttctttgggatgtttcaattgaagtcacagtgttgaacattccctttcacagagcaggtatgaaacactctttttgtagtgtctataagtgaacatttggcgtgctttcaggcgtaacgtgaaaaaggaaatatcttcccataaaaactagacagaagcattctcagaaacttgtttgtgatgtgtgccctctactgacagagttgaacctttccttgcaaagagcagctttgacacactctttttgtagaatctgcaagaggctatttggatagctttgaggatttcgttggaaacgggtatgtcttcagataaactctagacagaagcattctcagaaacttctttgagatgttgcattcaagtcacagagtagaacattcccattcatagagcagatttgaaacactctttttgtagtatctgaaagtggacatttggagcgctttcaggcctatgatgaaaaaggaaatatcttcccataaaaactagacggaagcattctcagaaacttacttgtgatgtgtttgctcaactaacagaattgaaccatcgttttgaaggagcagttttgaaacactgttttcgtggaatctgcaagtggatatttggctagcttggaggatttcgttggaaacgggattacatataaaaaggagacagcagcattctcagaaacttctttgtgatgtctgcattcaagtcacagagttgagcattccctttcatagagcaggtttgaaacactctttttgtagtatctggatgaggacatttggagcgctttcaggcgtatggtgaaaaaggaaatatcttcccgtaaaaactagacagaagcattctcagaaatttatttgtgatgtgtgccctcaactaacagagttgaacctttcttttgatagagcagttttgaaacactctttttgtaaaatctgcaagaggatatttggatagctttgaggatttcgttgcaaacgggaatggcttcatataaactctagacagaagcattctcagaaacttcgttgggatgtttcgattgaagtcccagtgttgaacattcccttttatagagcaggttggaaacactctttttgcattccctggaagtggacatttggagcgctttcaggacgacggtgaaaatggaaatatcttccaataaaatctagatagaagcaatgtcagaaacttttctgtgatggatctactcagctaacagagttgaacctttgttttgagagagcagttttgcaacactctttttgtggaatatgcaagtggataatagggcagctttgaggatttcgttggaaacgggaatacatgtaaaaagcagacagcagcattctcagaaacttctttgtgatgtttgcattgaagtcacagagttgaacattccctttgagagagcaggtttgaaacacgccttttgtcatatctggaagtgtccattcggagcgcattcaggcttgtgttgaaaaaggaaatatcctcccataaaaactagacagaagcattctcagaaacttatctgtgatgtatgtactcaactaacagaactaaaccatcgttttgaaggagcagttttgaaacactctttttgcggaatctgcaagtggatatttggctagctgggaggatttcgttggaaacgggattacatacaaaaagcagacagcagcattctcagaaacttctttgtgatgtttgcattcaagtcacagagttgaacattccctttcatagagcaggtttgaaacactctttttgtagtatctggatgtggacatttggatcgctttcaggcctatggtgaaaaaggaaatatcttcccatgaaaactagacagaagcattctcagaaacttatttgtgatgtgtgccctcaactgacagtgttgaacctttgttttgatagagcagttctgaaacacactttttgtaaaatctgcaagaggatatttggatagctttgaggatttcgttggaaacgggaatgtcttcatgtaaactctacacagaagcattctcagaaactgctttgggatgtttcaattgaagtcccagtgttgaacattcccattcatagagcaggtttgaaacactctttttgtactatctggaagtggacatttggagcgctttcaggtctacggtgaaaaaggagatatcttccaataaaaactagatagaagcaatgtcagaacttttttcatgatgtatctactcagctaacagagttgaacctttcttttgagagagcagttttgaaacactctttttgtggaatatgcaagtgggtattaggccagcttggaggatttcgttggaaacgggaatacgtataaaaagcagacagcagcattgtcagaaactactttgtgatgtttgcattcaagtcacagaattgaacactccctttcacagagcaggtttgaaacactctttttgtagtgtctgtaagtgaacatatggattgctttcaggcctaaggtgaaaaaggaaatatcttcccataaaaactagacagaagcattctcagaaacttgtttgtgatgtgtgccctctactgacagagttgaacctttctttgcaaagagcagttttgaaacactctttttgtagaatctgcaagaggatatttggatagctttgaggatttcttgggaaacgggaatgtcttcagataaactctagacagaagcattctcagaaacttctttgggatgtttcaattgaagtcacagtgttgaacattccctttcacagagcaggtttgaaacactctttttgtagtgtctataagtgaacatttggcgtgctttcaggcctaacgtgaaaaaggaaatatcttcccataaaaactagacagaagcattctcagaaacttgttcgtgatgtgtgccctctactgacagagttgaacctttctttgcaaagagcagctttgaaacacactttttgtagaatctgcaagaggatatttggatagctttgaggatttcgttggaaacgggtatgtcttcagatatactctagacagaagcattctcagaaatttctttgggatgttgcattcaagtcacagagtagaacattcccattcatagagcagatttgaaacactctttttgtagtatctggaagtggacatttggagcgctttcaggcctatgttgaaaaaggaaatatcttcccataaaaactagacggaagcattctcagaaacttatttgtgatgtgtttgctcaactaacaggattgaaccatcgttttgaaggagcagttttgaaacactgttttcgtggaatctgcaagtggatatttggctagctttgaggatttcgttggaaacgggattacatataaaaaggagacagcagcattctcagaaacttctttgtgatgtctgcattcaattcacagagttgagcattccctttcatagagcaggttggaaacactctttttgtagtatctggatgaggacatttggagcgctttcaggcgtatggtgaaaaaggaaatatcttcccgtaaaaactagacagaagcattctcagaagtttatttgtgatgtgtgccctcaactaacagagttgaacctttcttttgatagagcagttttgaaacactcattttgtaaaatctgcaagaggatatttggatagctttgaggatttcgttgcaaacgggaatggcttcatataaactctagacagaagcattctcagaaacttcgtcgggatgtttcgattgaagtcccagtgttgaacattcccttttatagagcaggttggaaacactctttctgcattccctggaagtggacatttggagcgctttcaggacgacggtgaaaatggaaatatcttccaataaaatctggatagaagcaatgtcagaaacttttatgtgatggatctactcagctaacagagttgaacctttcttttgagagagcagttttgcaacactctttttgtggaatatgcaagtggatattagggcagctttgaggatttcgttggaaacgggaatacatgtaaaaagcagacagcagcattctcagaaacttctttgtgatgtttgcattgaagtcacagagttgaacattccctttgagagagcaggtttgaaacacgccttttgtcatatctggaagtgtccattcggagcgcattcaggcttgtgttgaaaaaggaaatatcctcccataaaaactagacagaagcattctcagaaacttatctgtgatgtatgtactcaactaacagaactaaaccatcgttttgaagggcagttttgaaacactctttttgcggaatctgcaagtggatatttggctagctgggaggatttcgttggaaacgggattacatacaaaaagcagacagcagcattctcagaaacttctttgtgatgtttgcattcaagtcacagagttgaacattccctttcatagagcaggtttgaaacactctttttgtagtatctggatgtggacatttggatcgctttcaggcctatggtgaaaaaggaaatatcttcccatgaaaactagacagaagcattctcagaaacttatttgtgatgtgtgccctcaactgacagtgttgaacctttgttttgatagagcagttctgaaacacactttttgtaaaatctgcaagaggatatttggatagctttgaggatttcgttggaaacgggaatgtcttcatgtaaactctagacagaagcattctcagaaactgctttgggatgtttcaattgaagtcccagtgttgaacattcccattcatagagcaggtttgaaacactctttttgtactatctggaagtggacatttggagcgctttcaggtctacgatgaaaaaggagatatcttccaataaaaactagatagaagcaatgtcagaacttttttcatgatgtatctactcagcaaacagagttgaacctttcttttgagagagcagttttgaaacactccttttgtggaatatgcaagtgggtattaggccagcttggaggatttcgttggaaacgggaatacgtataaaaagcagacagcagcattgtcagaaactactttgtgatgtttgcattcaagtcacagaattgaacactccctttcacagagcaggtttgaaactctctttttgtagtgtctataagtgaacatttggcgtgctttcaggcgtaacgtgaaaaaggaaatatcttcccataaaaactagacagaagcattctcagaaacttgttcttgatgtgtgccctctactgacagagttgaacctttctttgcaaagagcagttttgaaacactctttttgtagaatctgcaagaggatatttggatagctttgaggatttcttgggaaacgggaatgtcttcagataaactctagacagaagcattctcagaaacttctttgggatgtttcaattgaagtcacagtgttgaacattccctttcacagagcaggtttgaaacactctttttgtagtgtctataagtgaacatttggcgtgctttcaggcctaacgtgaaaaaggaaatatcttcccataaaaactagacagaagcattctcagaaacttgttcttgatgtgtcccctctactgacagagttgaacctttctttgcaaagagcagctttgaaacactctttttgtagaatctgcaagaggatatttggatagcttggaggatttcgttggaaacgggtatgtcttcagataaactctagacagaagcattctcagaaacttctttgggatgttgcattcaagtcacagagtagaacattcccattcatagagcagatttgaaacactctttttgtagtatctggaagtggacatttggagcgctttcaggcctatgttgaaaaaggaaatatcttcccataaaaactagacggaagcattctcagaaacttatttgtgatgtgtttgctcaactaacaggattgaaccatcgttttgaaggagcagttttgaaacactgttttcgtggaatctgcaagtggatatttggctagctttgaggatttcgttggaaacgggattacatataaaaaggagacagcagcattctcagaaacttctttgtgatgtctgcattcaattcacagagttgagcattccctttcatagagcaggttggaaacactctttttgtagtatctggatgaggacatttggatcgctttcaggcctatggtgaaaaaggaaatatcttcccatgaaaactagacagaagcattctcagaaacttatttgtgatgtgtgcactcaactgacagtgttgaacctttgttttgatagagcagttctgaaacacactttttgtaaaatctgcaagaggatatttggatagctttgaggatttcgttggaaacgggaatgtcttcatgtaaactctagacagaagcattctcagaaactgctttgggatgtttcaattgaagtcccagtgttgaacattcccattcatagagcaggtttgaaacactctttttgtactatctggaagtggacatttggagcgctttcaggtctacggtgaaaaaggagatatcttccaataaaaactagatagaagcaatgtcagaacttttttcatgatgtatctactcagcaaacagagttgaacctttcttttgagagagcagttttgaaacactctttttgtggaatatgcaagtgggtattaggccagcttggaggatttcgttggaaacgggaatacgtataaaaagcagacagcagcattgtcagaaactactttgtgatgtttgcattcaagtcacagaattgaacactccctttcacagagcaggtttgaaacactctttttgtagtgtctgtaagtgaacatatggattgctttcaggcctaaggtgaaaaaggaaatatcttcccataaaaactagacagaagcattctcagaaacttgtttgtgatgtgtgccctctactgacagagttgaacctttctttgcaaagagcagctttgaaacactctttttgtagaatctgcaagaggatatgtggatagctttgaggatttcgttggaaacgggtatgtcttcagataaactctagacagaagcattctcagaaacttctttgggatgtttcaactgaagtcacagtgttgaacattccctttcacagagcaggtttgaaacactctttttgtagtgtctataagtgaacatttggcgtgctttcaggcctaacgtgaaaaaggaaatatcttcccataaaaactagacagaagcattctcagaaacttgttcatgatgtgtgccctctactgacagagttgaacctttctttgcaaagagcagctttgaaacactctttttgtagaatctgcaagaggatatttggatagctttgaggatttcgttggaaacgggtatgtcttcagataaactctagacagaagcattctcagaaacttctttgggatgttgcattcaagtcacagagtagaacattcccattcatagagcagatttgaaacactctttttgtagtatctggaagtggacatttggagcgctttcaggcctatgttgaaaaaggaaatatcttcccataaaaactagacggaagcattctcagaaacttacttgtgatgtgtttgctcaactaacagaattgaaccatcgttttgaaggagcagttttgaaacactgttttcgtggaatctgcaagtggatatttggctagctttgaggatttcgttggaaacgggattacatatacaaaggagacagcagcattctcagaaacttctttgtgatgtctgcattcaagtcacagagttgagcattccctttcatagagcaggttggaaacactctttttgtagtatctggatgaggacatttggagcgctttcaggcctatggtgaaaaaggaaatatcttcccgtaaaaactagacagaagcattctcagaaatttatttgtgatgtgtgccctcaactaacagagttgaacctttcttttgatagagcagttttgaaacactctttttgtaaaatctgcaagaggatatttggatagctttgaggatttcgttgcaaacgggaatggcttcatataaactcctagacagaagcattctcaagaaacttcgttgggatgtttcgattgaagtcccagtgttgaacattcccttttatagagcaggttggaaacactctttctgcattccctggaagtggacatttggagcgctttcaggacgacggtgaaaatggaaatatcttccaagaaaatctagatagaagcaacgtcagaaacttttctgtgatggatctactcagctaacagagttgaacctttcttttgagagagcagttttgcaacactctttttgtggaatatgcaagtggatattagggcagctttgaggatttcgttggaaacgggaatacatgtaaaaagcagacagcagcattctcagaaacttctttgtgatgtttgcattgaagtcacagagttgaacattccctttgagagagcaggtttgaaacacgccttttgtcatatctggaagtgtccattcggagcgcattcaggcttgtgttgaaaaaggaaatatcctcccataaaaactagacagaagcattctcagaaacttatctgtgatgtatgtactcaactaacagaactaaaccatcgttttgaaggagcagttttgaaacactctttttgcggaatctgcaagtggatatttggctagctgggaggatttcgttggaaacgggattacatacaaaaagcagacagcagcattctcagaaacttctttgtgatgtttgcattcaagtcacagagttgaacattccctttcatagagcaggtttgaaacactctttttgtagtatctggatgtggacatttggatcgctttcaggcctatggtgaaaaaggaaatatcttcccatgaaaactagacagaagcattctcagaaacttatttgtgatgtgtgccctcaactgacagtgttgaacctttgttttgatagagcagttctgaaacacactttttgtaaaatctgcaagaggatatttggatagctttgaggatttcgttggaaacgggaatgtcttcatgtaaactctagacagaagcattctcagaaactgctttgggatgtttcaattgaagtcccagtgttgaacattccctttcataggagcaggtttgaaacactctttttgtactatctggaagtggacatttggagcgctttcaggtctacggtgaaaaaggagatatcttccaataaaaactagatagagaagcaatgtcagaacttttttcatgatgtatctactcagctaacagagttgaacctttcttttgagagagcagttttgaaacactctttttgtggaatatgcaagtgggtattaggccagcttggaggatttcgttggaaacgggaatacgtataaaaagcagacagcagcattgtcagaaactactttgtgatgtttgcattcaagtcacagaattgaacactccctttcacagagcaggtttgaaacactctttttgtagtgtctgtaagtgaacatatggattgctttcaggcctaaggtgaaaaaggaaatatcttcccataaaaactagacagaagcattctcagaaacttgtttgtgatgtgtgccctctactgacagagttgaacctttctttgcaaagaccagttttgaaacactctttttgtagaatctgcaagaggatatttggatagctttgaagatttcttgggaaacgggaatgtcttcagataaactctagacagaagcattctcagaaacttctttgggatgtttcaattgaagtcacagtgttgaacattccctttcacagagcaggtttgaaacactctttttgtagtgtgtataagtgaacatttcgcgtgctttcaggcctaacgtgaaaaaggaaatatcttcccataaaaactagacagaagcattctcagaaacttgttcatgatgtgtgccctctactgacagagttgaacctttctttgcaaagagcagctttgaaacactctttttgtagaatctgcaagaggatatttggatagcttggaggatttcgttggaaacgggtatgtcttcagataaactctagacagaagcattctcagaaacttctttgggatgttgcattcaagtcacagagtagaacattcccattcatagagcagatttgaaacactctttttgtagtatctggaagtggacatttggagcgctttcaggcctatgttgaaaaaggaaatatcttcccataaaaactagacggaagcattctcagaaacttacttgtgatgtgtttgctcaactaacagaattgaaccattgttttgaaggagcagttttgaaacactgttttcgtggaatctgcaagtggatatttggctagctttgaggatttcgttggaaacgggattacatatacaaaggagacagcagcattctcagaaacttctttgtgatgtctgcattcaactcacagagttgagcattccctttcatagagcaggttggaaacactctttttgtagtatctggatgaggacatttggagcgctttcaggcctatggtgaaaaaggaaatatcttcccgtaaaaactagactgaagcattctcagaaatttatttgtgatgtgtgccctcaactaacagagttgaacctttcttttgatagagcagttttgaaacactctttttgtaaaatctgcaagaggatatttggatagctttgaggatttatctgcaaacgggaatggcttcatataaactctagacagaagcattctcagaaacttcattgggatgtttcgattgaagtcccagtgttgaacattcccttttatagagcaggttggaaacactctttctgcattccctggaagtggacatttggagcgctttcaggacgacggtgaaaatggaaatatcttccaagaaaatctagatagaagcaatgtcagaaacttttatgtgatggatctactcagctaacagagttgaagctttcttttgagagagcagttttgcaacattctttttgtggaatatgcaagtggatattagggcagctttgaggatttcgttggaaacgggaatacatgtaaaaagcagacagcagcattctcagaaacttctttgtgatgtttgcattgaagtcacagcagttgaacattccctttgagagagcaggtttgaaacacgccttttgtcatatctggaagtgtccattcggagcgcattcaggcttgtgttgaaaaaggaaatatcctcccataaaaactagacagaagcattctcagaaacttatctgtgatgtatgtactcaactaacagaactaaaccatcgttttgaaggagcagttttgaaacactctttttgcggaatctgcaagtggatatttggctagctgggaggatttcgttggaaacgggattacatacaaaaagcagacagcagcattctcagaaacttctttgtgatgtttgcattcaagtcacagagttgaacattccctttcatagagcaggtttgaaacactctttttgtagtatctggatgtggacatttggatcgcattcaggcctatggtgaaaaaggaaatatcttcccatgaaaactagacagaagcattctcagaaacttatttgtgatgtgtgccctcaactgacagtgttgaacctttgttttgatagagcagttctgaaacacactttttgtaaaatctgcaagaggatatttggatagctttgaggatttcgttggaaacgggaatgtcttcatgtaaactctagacagaagcattctcagaaactgctttgggatgtttcaattgaagtcccagtgttgaacattccctttcatagagcacgtttgaaacactctttttgtactatctggaagtggacatttggagcgctttcaggtctacggtgaaaaaggagatatcttccaataaaaactagatagaagcaatgtcagaacttttttcatgatgtatctactcagcaaacagagttgaacctttcttttgagagagcagttttgaaacactctttttgtggaatatgcaagtgggtattaggccagcttggaggatttcgttggaaacgggaatacgtataaaaagcagacagcagcattgtcagaaactactttgtgatgtttgcattcaagtcacagaattgaacactccctttcacagagcaggtttgaaacactctttttgtagtgtctgtaagtgaacatttggattgctttcaggcctaaggtgaaaaaggaaatatcttcccataaaaactagacagaagcattctcagaaacttgtttgtgatgtgtgccctctactgacagagttgaacctttctttgcaaagagcagttttgaaacactctttttgtagaatctgcaagaggatatttggatagctttgaggatttcttgggaaacgggaatgtcttcagataaactctagacagaagcattctcagaaacttctttgggatgtttcaattgaagtcacagtgttgaacattccctttcacagagcaggtttgaaacactctttttgtagtgtctataagtgaacatttggcgtgctttcaggcctaacgtgaaaaaggaaatatcttcccataaaaactagacagaagcattctcagaaacttgttcgtgatgtgtgccctctactgacagagttgaacctttctttgcaaagagcagctttgaaacacactttttgtagaatctgcaagaggatatttggatagctttgaggatttcgttggaaacgggtatgtcttcagataaactctagacagaagcattctcagaaacttctttgggatgttgcattcaagtcacagagtagaacattcccattcatagagcagatttgaaacactctttttgtagtatctggaagtggacatttggagcgctttcaggcctatgttgaaaaaggaaatatcttcccataaaaactagacggaagcattctcagaaacttacttgtgatgtgtttgctcaactaacagaattgaaccatcgttttgaaggagcagttttgaaacactgttttcgtggaatctgcaagtggatatttggctagctttgaggatttcgttggaaacgggattacatataaaaaggagacagcagcattctcagaaacttctttgtgatgtctgcattcaagtcacagagttgagcattccctttcatagagcaggttggaaacactctttttgtagtatctggatgaggacatttggagcgctttcaggcgtatggtgaaaaaggaaatatcttcccgtaaaaactagacagaagcattctcagaaatttatttgtgatgtgtgccctcaactaacagagttgaacctttcttttgatagagcagttttgaaacactctttttgtaaaatctgcaagaggatatttggatagctttgaggatttcgttgcaaacgggaatggcttcatataaactctagacagaagcattctcagaaacttcgttgggatgtttcgattgaagtcccagtgttgaacattcccttttatagagcaggttggaaacactctttctgcattccctggaagtggacatttggagcgctttcaggacgacggtgaaaatggaaatatcttccaagaaaatctagatagaagcaacgtcagaaacttttctgtgatggatctactcagctaacagagttgaacctttcttttgagagagcagttttgcaacactctttttgtggaatatgcaagtggatattagggcagctttgaggatttcgttggaaacgggaatacatgtaaaaagcagacagcagcattctcagaaacttctttgtgatgtttgcattgaagtcacagagttgaacattccctttgagagagcaggtttgaaacacgccttttgtcatatctggaagtgtccattcggagcgcattcaggcttgtgttgaaaaaggaaatatcctcccataaaaactagacagaagcattctcagaaacttatctgtgatgtatgtactcaactaacagaactaaaccatcgttttgaaggagcagttttgaaacactctttttgcggaatctgcaagtggatatttggctagctgggaggatttcgttggaaacgggattacatacaaaaagcagacagcagcattctcagaaacttctttgtgatgtttgcattcaagtcacagagttgaacattccctttcatagagcaggtttgaaacactctttttgtagtatctggatgtggacatttggatcgctttcaggcctatggtgaaaaaggaaatatcttcccatgaaaactagacagaagcattctcagaaacttatttgtgatgtgtgccctcaactgacagtgttgaacctttgttttgatagagcagttctgaaacacactttttgtaaaatctgcaagaggatatttggatagctttgaggatttcgttggaaacgggaatgtcttcatgtaaactctagacagaagcattctcagaaactgctttgggatgtttcaattgaagtcccagtgttgaacattccctttcatagagcaggtttgaaacactctttttgtactatctggaagtggacatttggagcgctttcaggtctacggtgaaaaaggagatatcttccaataaaaactagatagaagcaatgtcagaacttttttcatgatgtatctactcagcaaacagagttgaacctttcttttgagagagcagttttgaaacactctttttgtggaatatgcaagtgggtattaggccagcttggaggatttcgttggaaacgggaatacgtataaaaagcagacagcagcattgtcagaaactactttgtgatgtttacattcaagtcacagaattgaacactccctttcacagaacaggtttgaaacactctttttgtagtgtctgtaagtgaacatttggattgctttcaggcctaaggtgaaaaaggaaatatcttcccataaaaactagacagaagcattctcagaaacttgtttgtgatgtgtgccctctactgacagagttgaacctttctttgcaaagagcagttttgaaacactctttttgtagaatctgcaagaggatatttggatagctttgaggatttcttgggaaacgggaatgtcttcagataaactctagacagaagcattctcagaaacttctttgggatgtttcaattgaagtcacagtgttgaacattccctttcacagagcaggtttgaaacactctttttgtagtgtctataagtgaacatttggcgtgctttcaggcgtaacgtgaaaaaggaaatatcttcccataaaaaccagacagaagcattctcagaaacttgttcctgatgtgtgccctctaactgacagagttgaacctttctttgcaaagagcagctttgaaacactctttttgtagaatctgcaagaggatatttggatagctttgaggatttcgttggaaacggggatgtcttcagataaactctagacagaagcattctcagaaacttctttgggatgttgcattcaagtcacagagtagaacattcccattcatagagcagatttgaaacactctttttgtagtatctggaagtggacatttggagcgctttcaggcctatgttgaaaaaggaaatatcttcccataaaaactagacggaagcattctcagaaacttatttgtgatgtgtttgctcaactaacaggattgaaccatcgttttgaaggagcagttttgaaacactgttttcgtggaatctgcaagtggatatttggctagctttgaggatttcgttggaaacgggattacatataaaaaggagacagcagcattctcagaaacttctttgtgatgtctgcattcaattcacagagttgagcattccctttcatagagcaggttggaaacactctttttgtagtatctggatgaggacatttggagcgctttcaggcgtatggtgaaaaaggaaatatcttcccgtaaaaactagacagaagcattctcagaagtttatttgtgatgtgtgccctcaactaacagagttgaacctttcttttgatagagcagttttgaaacactctttttgtaaaatctgcaagaggatatttggatagctttgaggatttcgttgcaaacgggaatggcttcatataaactctagacagaagcattctcagaaacttcgttgggatgtttcgattgaagtcccagtgttgaacattcccttttatagagcaggttggaaacactctttctgcattccctggaagtggacatttggagcgctttcaggacgacggtgaaaatggaaatatcttccaagaaaatctagatagaagcaacgtcagaaacttttctgtgatggatctactcagctaacagagttgaacctttcttttgagagagcagttttgcaacactctttttgtggaatatgcaagtggatattagggcagctttgaggatttcgttggaaacgggaatacatgtaaaaagcagacagcagcattctcagaaacttctttgtgatgtttgcattgaagtcacagagttgaacattccctttgagagagcaggtttgaaacacgccttttgtcatatctggaagtgtccattcggagcgcattcaggcttgtgttgaaaaaggaaatatcctcccataaaaactagacagaagcattctcagaaacttatctgtgatgtatgtactcaactaacagaactaaaccatcgttttgaaggagcagttttgaaacactctttttgcggaatctgcaagtggatatttggctagctgggaggatttcgttggaaacgggattacatacaaaaaggagacagcagcattctcagaaacttctttgtgatgtttgcattcaagtcacagagttgaacattccctttcatagagcaggtttgaaacactctttttgtagtatctggatgtggacatttggatcgctttcaggcctatggtgaaaaaggaaatatcttcccatgaaaactagacagaagcattctcagaaacttatttgtgatgtgtgccctcaactgacagtgttgaacctttgttttgatagagcagttctgaaacacactttttgtaaaatctgcaagaggatatttggatagctttgaggatttcgttggaaacgggaatgtcttcatgtaaactctacacagaagcattctcagaaactgctttgggatgtttcaattgaagtcccagtgttgaacattcccattcatagagcaggtttgaaacactctttttgtactatctggaagtggacatttggagcgctttcaggtctacggtgaaaaaggagatatcttccaataaaaactagatagaaagcaatgtcagaacttttttcatgatgtatctactcagcaaacagtagttgaacctttcttttgagagagcagttttgaaacactctttttgtggaatatgcaagtgggtattaggccagcttggaggatttcgttggaaacgggaatacgtataaaaagcagacagcagcattgtcagaaactactttgtgatgtttgcattcaagtcacagaattgaacactccctttcacagggcaggtttgaaacactctttttgtagtgtctgtaagtgaacatttggattgctttctggcctaaggtgaaaaaggaaatatcttcccataaaaactagacagaagcattctcagaaacttgtttgtgatgtgtgccctctactgacagagttgaaactttctttgcaaagagcagttttgaaacactctttttgtagaatctgcaagaggatatttggatagctttgaggatttcttgggaaacgggaatgtcttcagataaactctagacagaagcattctcagaaacttctttgggatgtttcaattgaagtcagtgttgaacattccctttcacagagcaggtttgaaacactctttttgtagtgtctataagtgaacatttggcgtgctttcaggcgtaacgtgaaaaaggaaatatcttcccataaaaactagacagaagcattctcagaaacttgttcttgatgtgtcccctctactgacagagttgaacctttctttgcaaagagcagctttgaaacactctttttgtagaatctgcaagaggatatttggatagcttggaggatttcgttggaaacgggtatgtcttcagataaactctagacagaagcattctcagaaacttctttgggatgttgcattcaagtcacagagtagaacattcccattcatagagcagatttgaaacactctttttgtagtatctggaagtggacatttggagcgctttcaggcctatgttgaaaaaggaaatatcttcccataaaaactacacggaagcattctcagaaacttatttgtgatgtgtttgctcaactaacaggattgaaccatcgttttgaaggagcagttttgaaacactgttttcgtggaatctgcaagtggatatttggctagctttgaggatttcgttggaaacgggattacatataaaaaggagacagcagcattctcagaaacttctttgtgatgtctgcattcaattcacagagttgagcattccctttcatagagcaggttggaaacactctttttgtagtatctggatgaggacatttggagcgctttcagccgtatggtgaaaaaggaaatatcttcccgcaaaaactagacagaagcattctcagaaatttatttgtgatgtgtgccctcaactaacagagttgaacctttcttttgatagagcagttttgaaacactctttttgtaaaatctgcaagaggatatttggatagctttgaggatttcgttgcaaacgggaatggcttcatataaactctagacagaagcattctcagaaacttcgttgggatgtttcgattgaagtcccagtgttgaacattcccttttatagagcaggttggaaacactctttctgcattccctggaagtggacatttggagcgctttcaggttgacggtgaaaatggaaatatcttccaagaaaatctagatagaagcaacgtcagaaacttctctgtgatggatctactcagctaacagagttgaacctttcttttgagagagcagttttgcaacactctttttgtggaatatgcaagtggatattagggcagctttgaggatttcgttggaaacgggaatacatgtaaaaagcagacagcagcattctcagaaacttctttgtgatgtttgcattgaagtcacagagttgaacattccctttgagagagcaggtttgaaacacgccttttgtcatatctggaagtgtccattcggagcgcattcaggcttgtgttgaaaaaggaaatatcctcccataaaaactagacagaagcattcccagaaacttatctgtgatgtatgtactcaactaacagaactaaaccatcgttttgaaggagcagttttgaaacactctttttgcggaatctgcaagtggatatttggctagcagggaggatttcgttggaaacgggattacatacaaaaagcagacagcagcattctcagaaacttctttgtgatgtttgcattcaagtcacagagttgaacattccctttcatagagcaggtttgaaacactctttttgtagtatctggatgtggacatttggatcgctttcaggtctatggtgaaaaaggaaatatcttcccatgaaaactagacagaagcattctcagaaacttatttgtgatgtgtgccctcaactgacagtgttgaacctttgttttgatagagcagttctgaaacacactttttgtaaaatctgcaagaggatatttggatagctttgaggatttcgttggaaacgggaatgtcttcatgtaaactctagacagaagcattctcagaaactgctttgggatgtttcaattgaagtcccagtgttgaacattccctttcatagagcaggtttgaaacactctttttgtactatctggaagtggacatttggagcgctttcaggtctacggtgaaaaaggagatatcttccaataaaaactagatagaagcaatgtcagaacttttttcatgatgtatctactcagcaaacagagttgaacctttcttttgagagagcagttttgaaacactctttttgtggaatatgcaagtgggtattaggccagcttggaggatttcgttggaaacgggaatacgtataaaaagcagacagcagcattgtcagaaactactttgtgatgtttgcattcaagtcacagaattgaacactccctttcacagagcaggtttgaaacactctttttgtagtgtctgtaagtgaacatttggattgctttcaggcctaaggtgaaaaagggaaatatcttcccataaaaactagacagaagcattctcagaaacttgtttgtgatgtgtgccctctactgacagagttgaacctttcattgcaaagaccagttttgaaacactctttttgtagaatctgcaagaggatatttggatagctttgaggatttcttgggaaacgggaatgtcttcagataaactctagacagaagcattctcagaaacttctttgggatgtttcaattgaagtcacagtgttgaacattccctttcacagagcaggtttgaaacactctttttgtagtgtctataagtgaacatttggcgtgctttcaggcctaacgtgaaaaaggaaatatcttcccataaaaactagacagaagcattctcagaaacttgttcgtgatgtgtgccctctactgacagagttgaacctttctttgcaaagagcagctttgaaacactctttttgtagaatctgcaagaggatatttggatagctttgaggatttcgttggaaacgggtatgtcttcagataaactctagacagaagcattctcagaaacttctttgggatgttgcattcaagtcacagagtagaacattcccattcatagagcagatttgaaacactctttttgtagtatctggaagtggacatttggagcgctttcaggcctatgttgaaaaaggaaatatcttcccataaaaactagacggaagcattctcagaaacttacttgtgatgtgtttgctcaactaacagaattgaaccatcgttttgaaggagcagttttgaaacactgttttcgtggaatctgcaagtggatatttggctagctttgaggatttcgttggaaacgggattacatataaaaaggagacagcagcattctcagaaacttctttgtgatgtctgcattcaagtcacagagttgagcattccctttcatagagcaggttggaaacactctttttgtagtatctggatgaggacatttggagcgctttcaggcgtatggtgaaaaaggaaatatcttcccgtaaaaactagacagaagcattctcagaaatttatttgtgatgtgtgccctcaactaacagagttgaacctttcttttgatagagcagttttgaaacactctttttgtaaaatctgcaagaggatatttggatagctttgaggatttcgttgcaaacgggaatggcttcatataaactctagacagaagcattctcagaaacttcgttgggatgtttcgattgaagtcccagtgttgaacattcccttttatagagcaggttggaaacactctttctgcattccctggaagtggacaattggagcgctttcaggacgacggtgaaaatggaaatatcttccaataaaatctggatagaagcaacgtcagaaacttttctgtgatggatctactcagctaacagagttgaacctttcttttgagagagcagttttgcaacactctttttgtggaatatgcaagtggatattagggcagctttgaggatttcgttggaaacgggaatacatgtaaaaagcagacagcagcattctcagaaacttctttgtgatgtttgcattgaagtcacagagttgaacattccctttgagagagcaggtttgaaacacgccttttgtcatatctggaagtgtccattcggagcgcattcaggcttgtgttgaaaaaggaaatatcctcccataaaaactagacagaagcattctcagaaacttatctgtgatgtatgtactcaactaacagaactaaaccatcgttttgaaggagcagttttgaaacactctttttgcggaatctgcaagtggatatttggctagctgggaggatttcgttggaaacgggattacatacaaaaagcagacagcagcattctcagaaacttctttgtgatgtttgctttcaagtcacagagttgagcattccctttcatagagcaggttggaaacactctttttgtagtatctggatgtggacatttggatcgctttcaggcctatggtgaaaaaggaaatatcttcccatgaaaactagacagaagcattctcagaaacttatttgtgatgtgtgccctcaactgacagtgttgaacctttgttttgatagagcagttctgaaacacactttttgtaaaatctgcaagaggatatttggatagctttgaggatttcgttggaaacggtaatgtcttcatgtaaactctacacagaagcattctcagaaactgctttgggatgtttcaattgaagtcccagtgttgaacattcccattcatagagcaggtttgaaacactctttttgtactatctggaagtggacatttggagcgctttcaggtctacggtgaaaaaggagatatcttccaataaaaactagatagaagcaatgtcagaacttttttcatgatgtatctactcagcaaacagagttgaacctttcttttgagagagcagttttgaaacactctttttgtggaatatgcaagtgggtattaggccagcttggaggatttcgttggaaacgggaatacgtataaaaagcagacagcagcattgtcagaaactactttgtgatgtttgcattcaagtcacagaattgaacactccctttcacagagcaggtttgaaacactctttttgtagtgtctgtaagtgaacatatggattgctttcaggtctaaggtgaaaaaggaaatatcttcccataaaaactagacagaagcattctcagaaacttgtttgtgatgtgtgccctctactgacagagttgaacctttctttgcaaagagcagttttgaaacactctttttgtagaatctgcaagaggatatttggatagctttgaggatttcttgggaaacgggaatgtcttcagataaactctagacagaagcattctcagaaacttctttgggatgtttcaattgaagtcacagtgttgaacattccctttcacagagcaggtttgaaacactctttttgtagtgtctataagtgaacatttggcgtgctttcaggcgtaacgtgaaaaaggaaatatcttcccataaaaactagacagaagcattctcagaaacttgttcttgatgtgtcccctctactgacagagttgaacctttctttgcaaagagcagctttgaaacactctttttgtagaatctgcaagaggatatttggatagcttggaggatttcgttggaaacgggtatgtcttcagataaactctagacagaagcattctcagaaacttctttgggatgttgcattcaagtcacagagtagaacattcccattcatagagcagatttgaaacactctttttgtagtatctggaagtggacatttggagcgctttcaggcctatgttgaaaaaggaaatatcttcccataaaaactagacggaagcattctctgaaacttatttgtgatgtgtttgctcaactaacaggattgaaccatcgttttgaaggagcagttttgaaacactgttttcgtggaatctgcaagtggatatttggctagctttgaggatttcgttggaaacgggattacatataaaaaggagacagcagcattctcagaaacttctttgtgatgtctgcattcaattcacagagttgagcattccctttcatagagcaggttggaaacactctttttgtagtatctggatgaggacatttggagcgctttcaggcgtatggtgaaaaaggaaatatcttcccgtaaaaactagacagaagcattctcagaagtttatttgtgatgtgtgccctcaactaacagagttgaacctttcttttgatagagcagttttgaaacactctttttgtaaaatctgcaagaggatatttgcatagctttgaggatttcgttgcaaacgggaatggcttcatataaactctagacagaagcattctcagaaacttcgttgggatgtttcgattgaagtcccagtgttgaacattcccttttatagagcaggttggaaacactctttctgcattccctggaagtggacatttggagcgctttcaggacgacggtgaaaatggaaatatcttccaagaaaatctagatagaagcaatgtcagaaacttttatgtgatggatctactcagctaacagagttgaacctttcttttgagagagcagttttgcaacactctttttgtggaatatgcaagtggatattagggcagctttgaggatttcgttggaaacgggaatacatgtaaaaagcagacagcagcattctcagaaacttctttgtgatgtttgcattgaagtcacagagttgaacattccctttgagagagcaggtttgaaacacgccttttgtcatatctggaagtgtccattcggagcgcattcaggcttgtgttgaaaaaggaaatatcctcccataaaaactagacagaagcattctcagaaacttatctgtgatgtatgtactcaactaacagaactaaaccatcgttttgaaggagcagttttgaaacactctttttgcggaatctgcaagtggatatttggctagctgggaggatttcgttggaaacgggattacatacaaaaagcagacagcagcattttcagaaactactttgtgatgtttgcattcaagtcacagagttgaacattccctttcatacagcaggtttgaaacactctttttgtagtatctggatgtggacatttggatcgctttcaggcctatggtgaaaaaggaaatatcttcccatgaaaactagacagaagcattctcagaaacttatttgtgatgtgtgccctcaactgacagtgttgaacctttgttttgatagagcagttctgaaacacactttttgtaaaatctgcaagaggatatttggatagctttgaggatttcgttggaaacgggaatgtcttcatgtaaactctagacagaagcattctcagaaactgctttgggatgtttcaattgaagtcccagtgttgaacattcccattcatagagcaggtttgaaacactctttttgtactatctggaagtggacatttggagcgctttcaggtctacggtgaaaaaggagatatcttccaataaaaactagatagaagcaatgtcagaacttttttcatgatgtatctactcagcaaacagagttgaacctttcttttgagagagcagttttgaaacactctttttgtggaatatgcaagtgggtattaggccagcttggaggatttcgttggaaacgggaatacgtataaaaagcagacagcagcattgtcagaaactactttgtgatgtttgcattcaagtcacagaattgaacactccctttcacagagcaggtttgaaacactctttttgtagtgtctgtaagtgaacatttggattgctttcaggcctaaggtgaaaaaggaaatatcttcccataaaaactagacagaagcattctcagaaacttgtttgtgatgtgtgccctctactgacagagttgaacctttctttgcaaagagcagttttgaaacactctttttgtagaatctgcaagaggatatttggatagctttgaggatttcttgggaaacgggaatgtcttcagataaactctagacagaagcattctcagaaacttctttgggatgtttcaattgaagtcacagtgttgaacattccctttcacagagcaggtttgaaacactctttttgtagtgtctataagtgaacatttggcgtgctttcaggcgtaacgtgaaaaaggaaatatcttcccataaaaaccagacagaagcattctcagaaacttgttcttgatgtgtcccctctactgacagagttgaacctttctttgcaaagagcagctttgaaacactctttttgtagaatctgcaagaggatatttggatagcttggaggatttcgttggaaacgggtatgtcttcagataaactctagacagaagcattctcagaaacttctttgggatgttgcattcaagtcacagagtagaacattcccattcatagagcagatttgaaacactctttttgtagtatctggaagtggacatttggagcgctttcaggcctatgttgaaaaaggaaatatcttcccataaaaactagacggaagcattctcagaaacttatttgtgatgtgtttgctcaactaacaggattgaaccatcgttttgaaggagcagttttgaaacactgttttcgtggaatctgcaagtggatatttggctagctttgaggatttcgttggaaacgggattacatatacaaaggagacagcagcattctcagaaacttctttgtgatgtctgcattcaattcacagagttgagcattccctttcatagagcaggttggaaacactctttttgtagtatctggatgaggacatttggagcgctttctggcctatggtgaaaaaggaaatatcttcctgtaaaaactagacagaagcattctcagaagtttatttgtgatgtgtgccctcaactaacagagttgaacctttcttttgatagagcagttttgaaacactctttttgtaaaatctgcaagaggatatttggatagctttgaggatttcgttgcaaacgggaatggcttcatataaactctagacagaagcattctcagaaacttcgttgggatgtttcgattgaagtcccagtgttgaacattcccttttatagagcaggttggaaacactctttctgcattccctggaagtggacatttggagcgctttcaggacgacggtgaaaatggaaatatcttccaagaaaatctagatagaagcaatgtcagaaacttttatgtgatggatctactcagctaacagagttgaacctttcttttgagagagcagttttgcaacactctttttgtggaatatgcaagtggatattagggcagctttgaggatttcgttggaaacgggaatacatgtaaaaagcagacagcagcattctcagaaacttctttgtgatgtttgcattgaagtcacagagttgaacattccctttgagagagcaggtttgaaacacgccttttgtcatatctggaagtgtccattcggagcgcattcaggcttgtgttgaaaaaggaaatatcctcccataaaaactagacagaagcattctcagaaacttatctgtgatgtatgtactcaactaacagaactaaaccatcgttttgaaggagcagttttgaaacactctttttgcggaatctgcaagtggatatttggctagctgggaggatttcgttggaaacgggattacatacaaaaagcagacagcagcattctcagaaacttctttgtgatgtttgcattcaagtcacagagttgaacattccctttcatagagcaggtttgaaacactctttttgtagtatctggatgtggacatttggatcgctttcaggcctatggtgaaaaaggaaatatcttcccatgaaaactagacagaagcattctcagaaacttatttgtgatgtgtgccctcaactgacagtgttgaacctttgttttgatagagcagttctgaaacacactttttgtaaaatctgcaagaggatatttggatagctttgaggatttcgttggaaacgggaatgtcttcatgtaaactctagacaggaagcattctcagaaactgctttgggatgtttcaattgaagtcacagtgttgaacattcccattcatagagcaggtttgaaacactctttttgtactatctggaagtggacatttggagcgctttcaggtctacggtgaaaaaggagatatcttccaataaaaactagatagaagcaatgtcagaacttttttcatgatgtatctactcagcaaacagagttgaacctttcttttgagagagcagttttgaaacactctttttgtggaatatgcaagtgggtattaggccagcttggaggatttcgttggaaacgggaatacgtataaaaagcagacagcagcattgtcagaaactactttgtgatgtttgcattcaagtcacagaattgaacactccctttcacagagcaggtttgaaacactctttttgtagtgtctgtaagtgaacatttggattgctttcaggcctatgtgaaaaaggaaatatcttcccataaaaactagacagaagcattctcagaaacttgtttgtgatgtgtgccctctactgacagagttgaacctttctttgcaaagagcagttttgaaacactctttttgtagaatctgcaagaggatatttggatagctttgaggatttcttgggaaacgggaatgtcttcagataaactctagacagaagcattctcagaaacttctttgggatgtttcaattgaagtcacagtgttgaacattccctttcacagagcaggtttgaaacactctttttgtagtgtctataagtgaacatttggcgtgctttcaggcgtaacgtgaaaaaggaaatatcttcccataaaaaccagacagaagcattctcagaaacttgttcgtgatgtgtgccctctactgacagagttgaacctttctttgcaaagagcagctttgaaacacactttttgtagaatctgcaagaggatatttggatagcttggaggatttcgttggaaacgggtatgtcttcagataaactctagacagaagcattctcagaaacttctttgggatgttgcattcaagtcacagagtagaacattcccattcatagagcagatttgaaacactctttttgtagtatctggaagtggacatttggagcgctttcaggcctatgttgaaaaaggaaatatcttcccataaaaactagacggaagcattctcagaaacttatttgtgatgtgtttgctcaactaacaggattgaaccatcgttttgaaggagcagttttgaaacactgttttcgtggaatctgcaagtggatatttggctagctttgaggatttcgttggaaacgggattacatataaaaaggagacagcagcattctcagaaacttctttgtgatgtctgcattcaattcacagagttgagcattccctttcctagagcacgttggaaacactctttttgtagtatctggatgaggacatttggagcgctttcaggcgtatggtgaaaaaggaaatatcttcccgtaaaaactagacagaagcattctcagaaatttatttgtgatgtgtgccctcaactaacagagttgaacctttcttttgatagagcagttttgaaacactctttttgtaaaatctgcaagaggatatttggatagctttgaggatttcattgcaaacgggaatggcttcatataaactctagacagaagcattctcagaaacttcgttgggatgtttccgattgaagtcccagtgttgaacattcccttttatagagcaggttggaaaaactctttctgcattccctggaagtggacatttggagcgctttcaggacgacggtgaaaatggaaatatcttccaataaaatctagatagaagcaacgtcagaaacttttatgtgatggatctactcagctaacagagttgaacctttcttttgagagagcagttttgcaacactctttttgtggaatatgcaagtggatattagggcagctttgaggatttcgttggaaacgggaatacatgtaaaaagcagacagcagcattctcagaaacttctttgtgatgtttgcattgaagtcacagagttgaacattccctttgagagagcaggtttgaaacacgccttttgtcatatctggaagtgtccattcggagcgcattcaggcttgtgttgaaaaaggaaatatcctcccataaaaactagacagaagcattctcagaaacttatctgtgatgtatgtactcaactaacagaactaaaccatcgttttgaaggagcagttttgaaacactctttttgcggaatctgcaagtggatatttgtgcgtagctgggagaatttcgttggaaacgggattacatacaaaaagcagagagcagcattctcagaaacttctttgtgatgtttgcattcaagtcacagagttgaacattccctttcatagagcaggtttgaaacactctttttgtagtatctggatgtggacatttggatcgctttcaggcctatggtgaaaaaggaaatatcttcccatgaaaactagacagaagcattctcagaaacttatttgtgatgtgtgccctcaactgacagtgttgaacctttgttttgatagagcagttctgaaacacactttttgtaaaatctgcaagaggatatttggatagctttgaggatttcgttggaaacgggaatgtcttcatgtaaactctacacagaagcattctcagaaactgctttgggatgtttcaattgaagtcccagtgttgaacattcccattcatagagcaggtttgaaacactctttttgtactatctggaagtggacatttggagcgctttcaggtctacggtgaaaaaggagatatcttccaataaaaactagatagaagcaatgtcagaacttttttcatgatgtatctactcagctaacagagttgaacctttcttttgagagagcagttttgaaacactctttttgtggaatatgcaagtgggtattaggccagcttggaggatttcgttggaaacgggaatacgtataaaaagcagacagcagcattgtcagaaactactttgtgatgtttgcattcaagtcacagaattgaacactccctttcacagagcaggtttgaaacactctttttgtagtgtctgtaagtgaacatttggattgctttcaggcctaaggtgaaaaaggaaatatcttcccataaaaactagacagaagcattctcagaaacttgtttgtgatgtgtgccctctactgacagagttgaacctttctttgcaaagagcagttttgaaacactctttttgtagaatctgcaagaggatatttggatagctttgaggatttcttgggaaacgggaatgtcttcagataaactctagacagaagcattctcagaaacttctttgggatgtttcaattgaagtcacagtgttgaacattccctttcacagagcaggtttgaaacactctttttgtagtgtctataagtgaacatttggcgtgctttcaggcgtaacgtgaaaaaggaaatatcttcccataaaaaccagacagaagcattctcagaaacttgttcttgatgtgtcccctctactgacagagttgaacctttctttgcaaagagcagctttgaaacactctttttgtagaatctgcaagaggatatttggatagcttggaggatttcgttggaaacgggtatgtcttcagataaactctagacagaagcattctcagaaacttctttgggatgttgcattcaagtcacagagtagaacattcccattcatagagcagatttgaaacactctttttgtagtatctggaagtggacatttggagcgctttcaggcctatgttgaaaaaggaaatatcttcccataaaaactagacggaagcattctcagaaacttatttgtgatgtgtttgctcaactaacaggattgaaccatcgttttgaaggagcagttttgaaacactgttttcgtggaatctgcaagtggatatttggctagctttgaggatttcgttggaaacgggattacatataaaaaggagacagcagcattctcagaaacttctttgtgatgtctgcattcaattcacagagttgagcattccctttcatagagcaggttggaaacactctttttgtagtatctggatgaggacatttggagcgctttcaggcgtatggtgaaaaaggaaatatcttcccgtaaaaactagacagaagcattctcagaaatttatttgtgatgtgtgccctcaactaacagagttgaacctttcttttgatagagcagttttgaaacactctttttgtaaaatctgcaagaggatatttggatagctttgaggatttcgttgcaaacgggaatggcttcatataaactctagacagaagcattctcagaaacttcgttgggatgtttcgattgaagtcccagtgttgaacattcccttttatagagcaggttggaaacactctttctgcattccctggaagtggacatttggagcgctttcaggacgacggtgaaaatggaaatatcttccaagaaaatctagatagaagcaacgtcagaaacttttctgtgatggatctactcagctaacagagttgaacctttcttttgagagagcagttttgcaacactctttttgtggaatatgcaagtggatattagggcagctttgaggatttcgttggaaacgggaatacatgtaaaaagcagacagcagcattctcagaaacttctttgtgatgtttgcattgaagtcacagagttgaacattccctttgagagagcaggtttgaaacacgccttttgtcatatctggaagtgtccattcggagcgcattcaggcttgtgttgaaaaaggaaatatcctcccataaaaactagacagaagcattctcagaaacttatctgtgatgtatgtactcaactaacagaactaaaccatcgttttgaaggagcagttttgaaacactctttttgcggaatctgcaagtggatatttggctagctgggaggatttcgttggaaacgggattacatacaaaaagcagacagcagcattctcagaaacttctttgtgatgtttgcattcaagtcacagagttgaacattccctttcatagagcaggtttgaaacactctttttgtagtatctggatgtggacatttggatcgctttcaggcctatggtgaaaaaggaaatatcttcccatgaaaactagacagaagcattctcagaaacttatttgtgatgtgtgccctcaactgacagtgttgaacctttgttttgatagagcagttctgaaacacactttttgtaaaatctgcaagaggatatttggatagctttgaggatttcgttggaaacgggaatgtcttcatgtaaactctacacagaagcattctcagaaactgctttgggatgtttcaattgaagtcccagtgttgaacattcccattcatagagcaggttggaaacactctttttgtactatctggaagtggacatttggagcgctttcaggtctacggtgaaaaaggagatatcttccaataaaaactagatagaagcaatgtcagaacttttttcatgatgtatctactcagcaaacagagttgaacctttcttttgagagagcagttttgaaacactctttttgtggaatatgcaagtgggtattaggccagcttggaggatttcgttggaaacgggaatacgtataaaaagcagacagcagcattgtcagaaactactttgtgatgtttgcattcaagtcacagaattgaacactccctttcacagagcaggtttgaaacactctttttgtagtgtctgtaagtgaacatttggattgctttcaggcctaaggtgaaaaaggaaatatcttcccataaaaactagacagaagcattctcagaaacttgtttgtgatgtgtgccctctactgacagagttgaacctttctttgcaaagagcagttttgaaacactctttttgtagaatctgcaagaggatatttggatagctttgaggatttcttgggaaacgggaatgtcttcagataaactctagacagaagcattctcagaaacttctttgggatgtttcaattgaagtcacagtgttgaacattccctttcacagagcaggtttgaaacactctttttgtagtgtctataagtgaacatttggcgtgctttcaggcctaacgtgaaaaaggaaatatcttcccataaaaactagacagaagcattctcagaaacttgttcttgatgtgtcccctctactgacagagttgaacctttctttgcaaagagcagctttgaaacactctttttgtagaatctgcaagaggatatttggatatcttggaggatttcgttggaaacgggtatgtcttcagataaactctagacagaagcattctcagaaacttctttgggatgttgcattcaagtcacagagtagaacattcccattcatagagcagatttgaaacactctttttgtagtatctggaagtggacatttggagcgctttcaggcctatgttgaaaaagcaaatatcttcccataaaaactagacggaagcattctcagaaacttatttgtgatgtgtttgctcaactaacaggattgaaccatcgttttgaaggagcagatttgaaacactgttttcgtggaatctgcaagtggatatttggctagctttgaggatttcgttggaaacgggattacatataaaaaggagacagcagcattctcagaaacttctttgtgatgtctgcattcaattcacagagttgagcattccctttcatagagcaggttggaaacactctttttgtagtatctggatgaggacatttggagcgctttcaggcgtatggtgaaaaaggaaatatcttcccgtaaaaactagacagaagcattctcagaagtttatttgtgatgtgtgccctcaactaacagagttgaacctttcttttgatagagcagttttgaaacactctttttgtaaaatctgcaagaggatatttggatagctttgaggatttcgttgcaaacgggaatggcttcatataaactctagacagaagcattctcagaaacttcgttgggatgtttcgattgaagtcccagtgttgaacattcccttttatagagcaggttggaaacactctttctgcattccctggaagtggacatttggagcgctttcaggacgacggtgaaaatggaaatatcttccaagaaaatctagatagaagcaacatcagaaacttttatgtgatggatctactcagctaacagagttgaacctttcttttgagagagcagttttgcaacactctttttgtggaatatgcaagtggatattagggcagctttgaggatttcgttggaaacgggaatacatgtaaaaagcagacagcagcattctcagaaacttctttgtgatgtttgcattgaagtcacagagttgaacattccctttgagagagcaggtttgaaacacgccttttgtcatatctggaagtgtccattcggagcgcattcaggcttgtgttgaaaaaggaaatatcctcccataaaaactagacagaagcattctcagaaacttatctgtgatgtatgtactcaactaacagaactaaaccatcgttttgaaggagcagttttgaaacactctttttgcggaatctgcaagtggatatttggctagctgggaggatttcgttggaaacgggattacatacaaaaagcagacagcagcattctcagaaacttctttgtgatgtttgcattcaagtcacagagttgaacattccctttcatagagcaggtttgaaacactctttttgtagtatctggatgtggacatttggatcgctttcaggcctatggtgaaaaaggaaatatcttcccatgaaaactagacagaagcattctcagaaacttatttgtgatgtgtgccctcaactgacagtgttgaacctttgttttgatagagcagttctgaaacacactttttgtaaaatctgcaagaggatatttggatagctttgaggatttcgttggaaacgggaatgtcttcatgtaaactctacacagaagcattctcagaaactgctttgggatgtttcaattgaagtcccagtgttgaacattcccattcatagagcaggtttgaaacactctttttgtactatctggaagtggacatttggagcgctttcaggtctacggtgaaaaaggagatatcttccaataaaaactagatagaagcaatgtcagaacttttttcatgatgtatctactcagcaaacagagttgaacctttcttttgagagagcagttttgaaacactctttttgtggaatatgcaagtgggtattaggccagcttggaggatttcgttggaaacgggaatacgtataaaaagcagacagcagcattgtcagaaactactttgtgatgtttgcattcaagtcacagaattgaacactccctttcacagagcaggtttgaaacactctttttgtagtgtctgtaagtgaacatttggattgctttcaggcctaaggtgaaaaaggaaatatcttcccataaaaactagacagaagcattctcagaaacttgtttgtgatgtgtgccctctactgacagagttgaacctttctttgcaaagagcagttttgaaacactctttttgtagaatctgcaagaggatatttggatagctttgaggatttcttgggaaacgggaatgtcttcagataaactctagacagaagcattctcagaaacttctttgggatgtttcaattgaagtcacagtgttgaacattccctttcacagagcaggtttgaaacactctttttgtagtgtctataagtgaacatttggcgtgctttcaggcgtaacgtgaaaaaggaaatatcttcccataaaaactagacagaagcattctcagaaacttgttcgtgatgtgtgccctctactgacagagttgaacctttctttgcaaagagcagctttgaaacacactttttgtagaatctgcaagaggatatttggatagcttggaggatttcgttggaaacgggtatgtcttcagataaactctagacagaagcattctcagaaacttctttgggatgttgcattcaagtcacagagtagaacattcccattcatagagcagatttgaaacactctttttgtagtatctggaagtggacatttggagcgctttcaggcctatgttgaaaaaggaaatatcttcccataaaaactagacggaagcattctcagaaacttatttgtgatgtgtttgctcaactaacaggattgaaccatcgttttgaaggagcagttttgaaacactgttttcgtggaatctgtaagtggatatttggctagctttgaggatttcgttggaaacgggattacatataaaaaggagacagcagcattatcagaaacgtctttgtgatgtttgcattcaagtcacaaagttgaacattcgctttcatagagcaggtttgaaacactctttttgtagtatctgcaactggacatttggagcgctttgtggcctatggtgaaaaaggaaatatcttcccataaaaactagacagaagcattctcagaaacttgtttgtgatgtgtgtactcaactgacagagttgaacctttcttttgatagagcagttttgaaacactctttttgtagaatctgcaagtggatatttggatagctttgaggatttcattggaaacaggaatatcttcatataaaatctagacagaagcattctcagaaacatctctgtgatgtttgcattcaagtcacagagttgaacattccctttcatagagcaggtttgaaacactctttttgtagtatctggaagtgcacatttggagcgcattcaggcctaaggtgaaaaaggaaatatcttcccataaaaactagacagaagcattctcagaaatttatttgtgatgtgtgccctcaactaacagagttgaacctttcttttgatagagcagtttttaaacactctttttgtaaaatctgcaagaggatatttggatagctttgaggatttcgttgcaaacgggaatggcttcatataaactctagacagaagcattctcagaaacttcgttgggatgtttcgattgaagtcccagtgttgaacattcccttttatagagcaggttggaaacactctttctgcattccctggaagtggacatttggagcgctttcaggacgacggtgaaaatggaaatatcttccaataaaatctagatagaagcaacgtcagaaacttttctgtgatggatctactcagctaacagagttgaacctttcttttgagagagcagttttgcaacactttttgtggaatatgcaagtggatattagggcagctttgaggatttcgttggaaacgggaatacatgtaaaaagcagacagcagcattctcagaaacttctttgtgatgtttgcattgaagtcacagagttgaacattccctttgagagagcaggtttgaaacacgccttttgtcatatctggaagtgtccattcggagcgcattcaggcttgtgttgaaaaaggaaatatcctcccataaaaactagacagaagcattctcagaaacttatttgtgatgtatgtactcaactaacagaactaaaccatcgttttgaaggagcagttttgaaacactctttttgcggaatctgcaactggatatttggctagcttggaggatttcgttggaaacgggattacatacaaaaagcagacagcagcattctcagaaacttctttgtgatgtttgcattcaagtcgcagagttgaacattccctttcatagagcaggtttgaaacactctttttgtagtatctggatgtggacatttggatcgctttcaggcctatggtgaaaaacgaaatatcttcccatgaaaactagacagaagcattctcagaaacttatttgtgatgtgtgccctcaactgacagtgttgaacctttgttttgatagagcagttctgaaacacactttttgtaaaatctgcaagaggatatttggatagctttgaggatttcgttggaaacgggaatgtcttcatgtaaactctagacagaagcattctcagaaactgctttgggatgtttcaattgaagtcccagtgttgaacattccctttcatagagcaggtttgaaacactctttttgtagtatctggaagtggacatttggagcgctttcaggtctacggtgaaaaaggagatatcttccaataaaaactagatagaagcaatgtcagaacctttttcatgatgtatctactcagcaaacagagttgaacctttcttttgagagagcagttttgaaacactctttttgtggaatatgcaagtgggtatgaggccagcttggaggatttcgttggaaacgggaatacgtataaaaagcagacagcagcattgtcagaaactactttgtgatgtttgcattcaagtcacagaattgaacactcgctttcacagagcaggtttgaaacactctttttgtagtgtctgttactgaacatttggattgctttcaggcctaaggtgaaaaaggaaatatcttcccataaaaactagacagaagcattctcagaaacttgtttgtgatgtgtgccctctactgacagagttgaacctttctttgcaaagagcagttttgaaacactctttttgtagaatctgcaagaggatatttggatagctttgaggatttcttgggaaacgggaatgtcttcagataaactctagacagaagcattctcagaaacttctttgggatgtttcaattgaagtcacagtgttgaacattccctttcacagagcaggtttgaaacactctttttgtagtgtctataagtgaacatttggcgtgctttcaggcctaacgtgaaaaaggaaatatcttcccataaaaactagacagaagcattctcagaaacttgttcttgatgtgtcccctctactgacagagttgaacctttctttgcaaagagcagctttgaaacactctttttgtagaatctgcaagaggatatttggatagcttggaggatttcgttggaaacgggtatgtcttcagataaactctagacagaagcattctcagaaacttctttgggatgttgcattcaagtcacagagtagaacattcccattcatagagcagatttgaaacactctttttgtagtatctggaagtggacatttggagcgctttcaggcctatgttgaaaaaggaaatatcttcccataaaaactagacggaagcattctcagaaacttatttgtgatgtgtttgctcaactaacaggattgaaccatcgttttgaaggagcagttttgaaacactgttttcgtggaatctgcaagtggatatttggctagctttgaggatttcgttggaaacgggattacatataaaaaggagacagcagcattctcagaaacttctttgtgatgtttgcattcaattcacagagttgagcattccctttcatagagcaggttggaaacactctttttgtagtatctggatgtggacatttggatcgctttcaggcctatggtgaaaaaggaaatatcttcccatgaaaactagacagaagcattctcagaaacttatttgtgatgtgtgccctcaactgacagtgttgaacctttgttttgatagagcagttctgaaacacactttttgtaaaatctgcaagaggatatttggatagctttgaggatttcgttggaaacgggaatgtcttcatgtaaactctagacagaagcattctcagaaactgctttgggatgtttcaattgaagtcccagtgttgaacattccctttcatagagcaggtttgaaacactctttttgtactatctggaagtggacatttggagcgctttcaggtctacggtgaaaaaggagatatcttccaataaaaactagatagaagcaatgtcagaacttttttcatgatgtatctactcagcaaacagagttgaacctttcttttgagagagcagttttgaaacactccttttgtggaatatgcaagtgggtattaggccagcttggaggatttcgttggaaacgggaatacgtataaaaagcagacagcagcattgtcagaaactactttgtgatgtttgcattcaagtcacagaattgaacactccctttcacagagcaggtttgaaacactctttttgtagtgtctgtaagtgaacatttggattgatttcaggcctaaggtgaaaaaggaaatatcttcccataaaaactagacagaagcattctcagaaacttgtttgtgatgtgtgccctctactgacagagttgaacctttctttgcaaagagcagttttgaaacactctttttgtagaatctgcaagaggatatttggatagctttgaggatttcttgggaaacgggaatgtcttcagataaactctagacagaagcattctcagaaacttctttgggatgtttcaattgaagtcacagtgttgaacattccctttcacagagcaggtttgaaacactctttttgtagtgtctataagtgaacatttggcgtgctttcaggcgtaacgtgaaaaaggaaatatcttcccataaaaactagacagaagcattctcagaaacttgttcttgatgtgtcccctctactgacagagttgaacctttctttgcaaagagcagctttgaaacactctttttgtagaatctgcaagaggatatttggatagcttggaggatttcgttggaaacgggtatgtcttcagataaactctagacagaagcattctcagaaacttctttgggatgttgcattcaagtcacagagtagaacattcccattcatagagcagatttgaaacactctttttgtagtatctggaagtggacatttggagcgctttcaggcctatgttgaaaaaggaaatatcttcccataaaaactagacggaagcattctcagaaacttatttgtgatgtgtttgctcaactaacaggattgaaccatcgttttgaaggagcagttttgaaacactgttttcgtggaatctgcaagtggatatttggctagctttgaggatttcgttggaaacgggattacatataaaaaggagacagcagcattctcagaaacttctttgtgatgtctgcattcaagtcacagagttgagcattccctttcatagagcaggttggaaacactctttttgtagtatctggatgaggacatttggagcgctttcaggcctatggtgaaaaaggaaatatcttcccgtaaaaactagacagaagcattctcagaaatttatttgtgatgtgtgccctcaactaacagagttgaacctttcttttgatagagcagttttgaaacactctttttgtaaaatctgcaagaggatatttggatagctttgaggatttcgttgcaaacgggaatggcttcatataaactctagacagaagcattctcagaaacctcgttgggatgtttcgattgaagtcccagtgttgaacattcccttttatagagcaggttggaaacactctttctgcattccctggaagtggacatttggagcgctttcaggacgacggtgaaaatggaaatatcttccaagaaaatctagatagaagcaacgtcagaaacttttctgtgatggatctactcagctaacagagttgaacctttcttttgagagagcagttttgcaacactctttttgtggaatatgcaagtggatattagggcagctttgaggatttcgttggaaacgggaatacatgtaaaaagcagacagcagcattctcagaaacttctttgtgatgtttgcattgaagtcacagagttgaacattccctttgagagagcaggtttgaaacacgccttttgtcatatctggaagtgtccattcggagcgcattcaggcttgtgttgaaaaaggaaatatcctcccataaaaactagacagaagcattctcagaaacttatctgtgatgtatgtactcaactaacagaactaaaccatcgttttgaaggagcagttttgaaacactctttttgcggaatctgcaagtggatatttggctagctgggaggatttccgttggaaacgggattacatacaaaaagcagacagcagcattctcagaaacttctttgtgatgtttgcattcaagtcacagagttgaacattccctttcatagagcaggtttgaaacactctttttgtagtatctggatgtggacatttggatcgctttcaggcctatggtgaaaaaggaaatatcttcccatgaaaactagacagaagcattctcagaaacttatttgtgatgtgtgccctcaactgacagtgttgaacctttgttttgatagagcacttctgaaacacactttttgtaaaatctgcaagaggatatttggatagctttgaggatttcgttggaaacgggaatgtcttcatgtaaactctacacagaagcattctcagaaactgctttgggatgtttcaattgaagtcccagtgttgaacattcccattcatagagcaggtttgaaacactctttttgtactatctggaagtggacatttggagcgctttcaggtctacggtgaaaaaggagatatcttccaataaaaactagatagaagcaatgtcagaacttttttcatgatgtatctactcagcaaacagagttgaacctttcttttgagagagcagttttgaaacactctttttgtggaatatgcaagtgggtattaggccagcttggaggatttcgttggaaacgggaatacgtataaaaagcagacagcagcattgtcagaaactactttgtgatgtttgcattcaagtcacagaactgaacactccctttcacagagcaggtttgaaacactctttttgtagtgtctgtaagtgaacatttggattgctttcaggcctaaggtgaaaaaggaaatatcttcccataaaaactagacagaagcattctcagaaacttgtttgtgatgtgtgccctctactgacagagttgaacctttctttgcaaagagcagttttgaaacactctttttgtagaatctgcaagaggatatttggatagctttgaggatttcttgggaaacgggaatgtcttcagataaactctagacagaagcattctcagaaacttctttgggatgttataattgaagtcacagtgttgaacattccctttcacagagcaggtttgaaacactctttttgtagtgtctataattgaacatttggcgtgctttcaggcctaacgtgaaaaaggaaatatcttcccataaaaactagacagaagcattctcagaaacttgttcatgatgtgtgccctctactgacggagttgaacctttctttgcaaagagcagctttgaaacactctttttgtagaatctgcaagaggatatttggatagctttgaggatttcgttggaaacgggtatgtcttcagataaactctagacagaagcattctcagaaacttctttgggatgttgcattcaagtcacagagtagaacattcccattcatagagcagatttgaaacactctttttgtagtatctggaagtggacatttggagcgctttcaggcctatgttgaaaaaggaaatatcttcccataaaaactagacggaagcattctcagaaacttacttgtgatgtgtttgctcaactaacagaattgaaccatcgttttgaaggagcagttttgaaacactgttttcgtggaatctgcaagtggatatttggctagctttgaggatttcgttggaaacgggattacatataaaaaggagacagcagcattctcagaaacttctttgtgatgtctgcattcaagtcacagagttgagcattccctttcatagagcaggttggaaacactctttttgtagtatctggatgaggacatttggagcgctttcaggcgtatggtgaaaaaggaaatatcttcccgtaaaaactagacagaagcattctcagaaatttatttgtgatgtgtgccctcaactaacagagttgaacctttcttttgatagagcagttttgaaacactctttttgtaaaatctgcaagaggatatttggatagctttgaggatttcgttgcaaacgggaatggcttcatataaactctagacagaagcattctcagaaacttcgttgggatgtttcgattgaagtcccagtgttgaacattcccttttatagagcaggttggaaacactctttctgcattccctggaagtggacatttggagcgctttcaggacgacggtgaaaatggaaatatcttccaagaaaatctagatagaagcaacgtcagaaacttttctgtgatggatctactcagctaacagagttgaacctttcttttgagagagcagttttgcaacactctttttgtggaatatgcaagtggatattagggcagctttgaggatttcgttggaaacgggaatacatgtaaaaagcagacagcagcattctcagaaacttctttgtgatgtttgcattgaagtcacagagttgaacattccctttgagagagcaggtttgaaacacgccttttgtcatatctggaagtgtccattcggagcgcattcaggcttgtgttgaaaaaggaaatatcctcccagaaaaactagacagaagcattctcagaaacttatctgtgatgtatgtactcaactaacagaactaaaccatcgttttgaaggagcagttttgaaacactctttttgcggaatctgcaagtggatatttggctagctgggaggatttcgttggaaacgggattacatacaaaaagcagacagcagcattctcagaaacttgtttgtgatgtgtgccctctactgacagagttgaacctttctttgcaaagagcagttttgaaacactcttttgtagaatctgcaagaggatatttggatagctttgaggatttcttgggaaacgggaatgtcttcagataaactctagacagaagcattctcagaaacttctttgggatgtttcaattgaagtcacagtgttgaacattccctttcacagagcaggtttgaaacactctttttgtagtgtctataagtgaacatttggcgtgctttcaggcctaacgtgaaaaaggaaatatcttcccataaaaactagacagaagcattctcagaaacttgttcgtgatgtgtgccctctactgacagagttgaacctttctttgcaaagagcagctttgaaacacactttttgtagaatctgcaagaggatatttggatagcttggaggatttcgttggaaacgggtatgtcttcagataaactctagacagaagcattctcagaaacttctttgggatgttgcattcaagtcacagagtagaacattcccattcatagagcagatttgaaacactctttttgtagtatctggaagtggacatttggagcgctttcaggcctatgttgaaaaaggaaatatcttcccataaaaactagacggaagcattctcagaaacttacttgtgatgtgtttgctcaactaacagaattgaaccatcgttttgaaggagcagttttgaaacactgttttcgtggaatctgcaagtggatatttggctagctttgaggatttcgttggaaacgggattacatataaaaaggagacagcagcattctcagaaacttctttgtgatgtctgcattcaagtcacagagttgagcattccctttcatagagcaggttggaaacactctttttgtagtatctggatgaggacatttggagcgctttcaggcgtatggtgaaaaaggaaatatcttcccgtaaaaactagacagaagcattctcagaaatttatttgtgatgtgtgccctcaactaacagagttgaacctttcttttgatagagcagttttgaaacactctttttgtaaaatctgcaagaggatatttggatagctttgaggatttcgttgcaaacgggaatggcttcatataaactctagacagaagcattctcagaaacttcgttgggatgtttcgattgaagtcccagtgttgaacattcccttttatagagcaggttggaaacactctttctgcattccctggaagtggacatttggagcgctttcaggacgacggtgaaaatggaaatatcttccaagaaaatctagatagaagcaacgtcagaaacttttctgtgatggatctactcagctaacagagttgaacctttcttttgagagagcagttttgcaacactctttttgtggaatatgcaagtggatattagggcagctttgaggatttcgttggaaacgggaatacatgtaaaaagcagacagcagcattctcagaaacttctttgtgatgtttgcattgaagtcacagagttgaacattccctttgagagagcaggtttgaaacacaccttttgtcatatctggaagtgtccattcggagcgcattcaggcttgtgttgaaaaaggaaatatcctcccataaaaactagacagaagcattctcagaaacttatctgtgatgtatgtactcaactaacagaactaaaccatcgttttgaagggcagttttgaaacactctttttgcggaatctgcaagtggatatttggctagctgggaggatttcgttggaaacgggattacatacaaaaagcagacagcagcattctcagaaacttctttgtgatgtttgcattcaagtcacagagttgaacattccctttcatagagcaggtttgaaacactctttttgtagtatctggatgtggacatttggatcgctttcaggcctatggtgaaaaaggaaatatcttcccatgaaaactagacagaagcattctcagaaacttatttgtgatgtgtgccctcaactgacagtgttgaacctttgttttgatagagcagttctgaaacacactttttgtaaaatctgcaagaggatatttggatagctttgaggatttcgttggaaacgggaatgtcttcatgtaaactctagacaggaagcattctcagaaactgctttgggatgtttcaattgaagtcccagtgttgaacattccctttcataggagcaggtttgaaacactctttttgtactatctggaagtggacatttggagcgctttcaggtctacggtgaaaaaggagatatcttccaataaaaactagatagaagcaatgtcagaacttttttcatgatgtatctactcagcaaacagagttgaacctttcttttgagggagcagttttgaaacactatttttgtggaatatgcaagtgggtattaggccagcttggaggatttcgttggaaacgggaatacgtataaaaagcagacagcagcattctcagaaacttctttgtgatgtctgcattcaagtcacagagttgagcattccgtttcatagagcaggttggaaacactctttttgtagtatctggatgaggacatttggagcgctttcaggcctatggtgaaaaaggaaatatcttcccgtaaaaactagacagaagcattctcagaagtttatttgtgatgtgtgccctcaactaacagagttgaacctttcttttgatagagcagttttgaaacactctttttgtaaaatctgcaagaggatatttggatagctttgaggatttcgttgcaaacgggaatggcttcatataaactctagacagaagcattctcagaaacttcgttgggatgtttcgattgaagtcccagtgttgaacattcccttttatagagcaggttggaaacactctttctgcattccctggaagtggacatttggagcgctttcaggacgacggtgaaaatggaaatatcttccaagaaaatctagatagaagcaatgtcagaaacttttatgtgatggatctactcagctaacagagttgaacctttcttttgagagagcagttttgcaacactctttttgtggaatatgcaagtggatattagggcagctttgaggatttcgttggaaacgggaatacatgtaaaaagcagacagcagcattctcagaaacttctttgtgatgtttgcattgaagtcacagagttgaacattccctttgagagagcaggtttgaaacacgccttttgtcatatctggaagtgtccattcggagcgcattcaggcttgtgttgaaaaaggaaatatcctcccataaaaactagacagaagcattctcagaaacatatttgtgatgtatgtaatcaactaacagaactaaaccatcgttttgaaggagcagttttgaaacactctttttgcggaatctgcaagtggatatttggctagctgggaggatttcgttggaaacgggattacatacaaaaagcagacagcagcattctcagaaacttctttgtgatgtttgcattcaagtcacagagttgaacattccctttcatagagcaggtttgaaacactctttttgtagtatctggatgtggacatttggatcgctttcaggcctatggtgaaaaaggaaatatcttcccatgaaaactagacagaagcattctcagaaacttatttgtgatgtgtgccctcaactgacagtgttgaacctttgttttgatagagcagttctgaaacacactttttgtaaaatctgcaagaggatatttggatagctttgaggatttcgttggaaacgggaatgtcttcatgtaaactctagacagaagcattctcagaaactgctttgggatgtttcaattgaagtcccagtgttgaacattcccattcatagagcaggtttgaaacactctttttgtactatctggaagtggacatttggagcgctttcaggtctacggtgaaaaaggagatatcttccaataaaaactagatagaagcaatgtcagaacttttttcatgatgtatctactcagcaaacagagttgaacctttcttttgagagagcagttttgaaacactctttttgtggaatatgcaagtgggtattaggccagcttggaggatttcgttggaaacgggaatacgtataaaaagcagacagcagcattgtcagaaactactttgtgatgtttgcattcaagtcacagaattgaacactccctttcacagagcaggtttgaaacactctttttgtagtgtctgtaagtgaacatttggattgctttcaggcctaaggtgaaaaaggaaatatcttcccataaaaactagacagaagcattctcagaaacttgtttgtgatgtgtgccctctactgacagagttgaacctttctttgcaaagagcagttttgaaacactctttttgtagaatctgcaagaggatatttggatagatttgaggatttcttgggaaacgggaatgtcttcagataaactctagacagaagcattctcagaaacttctttgggatgtttcaatagaagtcacagtgttgaacattccctttcacagagcaggtttgaaacactctttttgtagtgtctataattgaacatttggcgtgctttcaggcctaacgtgaaaaaggaaatatcttcccataaaaactagacagaagcattctcagaaacttgttcgtgatgtgtgccctctactgacagagttgaacctttctttgcaaagagcagctttgaaacactctttttgtagaatctgcaagaggatatgtggatagctttgaggatttcgttggaaacgggtatgtcttcagataaactctagacagaagcattctcagaaacttctttgggatgtttcaattgaagtcacagtgttgaacattccctttcacagagcatgtttgaaacactctttttgtagtgtctataagtgaacatttggcgtgctttcaggcctaacgtgaaaaaggaaatatcttcccataaaagctagacagaagcattctcagaaacttgttcttgatgtgtcccctctactgacacagttgaacctttctttgcaaagagcagctttgaaacactctttttgtagaatctgcaagaggatatttggatagctttgaggatttcgttggaaacgggtatgtcttcagataaactctagacagaagcattctcagaaacttctttgggatgttgcattcaagtcacagagtagaacattcccattcatagagcagatttgaaacactctttttgtagtatctggaagtggacatttggagcgctttcaggcctatgttgaaaaaggaaatatcttcccataaaaactagacggaagcattctcagaaacttacttgtgatgtgtttgctcaactaacagaattgaaccatcgttttgaaggagcagttttgaaacactgttttcgtggaatctgcaagtggatatttggctagctttgaggatttcgttggaaacgggattacatataaaaaggagacagcagcattctcagaaacttctttgtgctgtctgcattcaagtcacagagttgagcattccttttcatagagcaggttggaaacactctttttgtagtatctggatgaggacatttggagcgctttcaggcgtatggtgaaaaaggaaatatcttcccgtaaaaactagacagaagcattctcagaaatttatttgtgatgtgtgccctcaactaacagagttgaacctttcttttgatagagcagttttgaaacactctttttgtaaaatctgcaagaggatatttggatagctttgaggatttcgttgcaaacgggaatggcttcatataaactctagacagaagcattctcagaaacttcgttgggatgtttcgattgaagtcccagtgttgaacattcccttttatagagcaggttggaaacactctttctgcattccctggaagtggacatttggagcgctttcaggacgacggtgaaaatggaaatatcttccaagaaaatctagatagaagcaatgtcagaaacttttatgtgatggatctactcagctaacagagttgaacctttcttttgagagagcagttttgcaacactctttttgtggaatatgcaagtggatattagggcagctttgaggatttcgttggaaacgggaatacatgtaaaaaggagacagcagcattctcagaaacttctttgtgatgtttgcattgaagtcacagagttgaacattccctttgagagagcaggtttgaaacacgccttttgtcatatctggaagtgtccattcggagcgcattcaggcttgtgttgaaaaaggaaatatcctcccataaaaactagacagaagcattctcagaaacttatctgtgatgtatgtactcaactaacagaactaaacccatcgttttgaaggagcagttttgaaacactctttttgcggaatctgcaagtggatatttggctagctgggaggatttcgttggaaacgggattacatacaaaaagcagacagcagcattctcagaaacttctttgtgatgtttgcattcaagtcacagagttgaactttccctttcataaagcaggtttgaaacactctttttgtagtatctggatgtggacatttggatcgctttcaggcctatggtgaaaaaggaaatatcttcccatgaaaactagacagaagcattctcagaaacttatttgtgatgtgtgccctcaactgacagtgttgaacctttgttttgatagagcagttctgaaacacactttttgtaaaatctgcaagaggatatttggatagctttgaggatttcgttggaaacgggaatgtcttcatgtaaactctagacagaagcattctcagaaactgctttgggatgtttcaattgaagtcccagtgttgaacattccctttcatagagcaggtttgaaacactctttttgtactatctggaagtggacatttggagcgctttcaggtctacggtgaaaaaggagatatcttccaataaaaactagatagaagcaatgtcagaacttttttcgtgatgtatctactcagcaaacagagttgaacatttcttttgagagagcagttttgaaacactctttttgtggaatatgcaagtgggtattaggccagcttggaggatttcgttggaaacgggaatacgtataaaaagcagacagcagcattgtcagaaactactttgtgatgtttgcattcaagtcacagaattgaacactccctttcacagagcaggtttgaaacactctttttgtagtgtctgtaagtgaacatttggattgctttcaggcctaaggtgaaaaaggaaatatcttcccataaaaactagacagaagcattctcagaaacttgtttgtgatgtgtgccctctactgacagagttgaacctttctttgcaaagagcagttttgaaacactctttttgtagaatctgcaagaggatatttggatagctttgaggatttcttgggaaacgggaatgtcttcagataaactctagacagaagcattctcagaaacttctttgggatgtttcaattgaagtcacagtgttgaacattccctttcacagagcaggtttgaaacactctttttgtagtgtctataagtgaacatttggcgtgcttcaggcctaacgtgaaaaaggaaatatcttcccataaaaactagacaaaagcattctcaggaaacttgttcttgatgtgtcccctctactgacagagttgaaccattctttgcaaagagcagctttgaaacactctttttgtagaatctgcaagaggatatttggatagctttgaggatttcgttggaaacgggtatgtcttcagataaactctagacagaagcattctcagaaacttctttgggatgttgcattcaagtcacagagtagaacattcgcattcatagagcagatttgaaacactctttttgtagtatctggaagtggacatttggagcgctttcaggcctatgttgaaaaaggaaatatcttcccataaaaactagacggaagcattctcagaaacttatttgtgatgtgtttgctcaactaacaggattgaaccatcgttttgaaggagcagttttgaaacactgttttcgtggaatctgcaagtggatatttggctagctttgaggatttcgttggaaacgggattacatataaaaaggagacagcagcattctcagaaacttctttgtgatgtctgcattcaattcacagagttgagcattccctttcatagagcaggttggaaacactctttttgtagtatctggatgaggacatttggagcgctttcaggcgtatggtgaaaaaggaaatatcttcccgtaaaaactagacagaagcattctcagaagtttatttgagatgtgtgccctcaactaacagagttgaacctttcttttgatagagcagttttgaaacactctttttgtaaaatctgcaagaggatatttggatagctttgaggatttcgttgcaaacgggaatggcttcatataaactctagacagaagcattctcagaaacttcgttgggatgtttcgattgaagtcccagtgttgaacattcccttttatagagcaggttggaaacactctttctgcattccctggaagtggacatttggagcgctttcaggacgacggtgaaaatggaaatatcttccaataaaatctagatagaagcaatgtcagaaacttttctgtgatggatctactcagctaacagagttgaacctttcttttgagagagcagttttgcaacactctttttgtggaatatgcaagtggatattagggcagctttgaggatttcgttggaaacgggaatacatgtaaaaagcagacagcagcattctcagaaacttctttgtgatgtttgcattgaagtcacagagttgaacattccctttgagagagcaggtttgaaacacgccttttgtcatatctggaagtgtccattcggagcgcattcaggcttgtgttgaaaaaggaaatatcctcccataaaaactagacagaagcattctcagaaacttatctgtgatgtatgtactcaactaaccgaactaaaccatcgttttgaaggagcagttttgaaacactctttttgcggaatctgcaagtggatatttggctagctgggaggatttcgttggaaacgggattacatacaaaaagcagacagcagcattctcagaaacttctttgtgatgtttgcattcaagtcacagagttgaacattccctttcatagagcaggtttgaaacactctttttgtagtatctggatgtggacatttggatcgctttcaggcctatggtgaaaaaggaaatatcttcccatgaaaactagacagaagcattctcagaaacttatttgtgatgtgtgccctcaactgacagtgttgaacctttgttttgatagagcagttctgaaacacactttttgtaaaatctgcaagaggatatttggatagctttgaggatttcgttggaaacgggaatgtcttcatgtaaactctacacagaagcattctcagaaactgctttgggatgtttcaattgaagtcccagtgttgaacattcccattcatagagcaggtttgaaacactctttttgtactatctggaagtggacatttggagcgctttcaggtctacggtgaaaaaggagatatcttccaataaaaactagatagaagcaatgtcagaacttttttcatgatgtatctactcagcaaacagagttgaacctttcttttgagagagcagttttgaaacactctttttgtggaatatgaaagtgggtattaggccagcttggaggatttcgttggaaacgggaatacgtataaaaagcagacagcagcattgtcagaaactactttgtgatgtttgcattcaagtcacagaactgaacactccctttcacagagcaggtttgaaacactctttttgtagtgtctgtaagtgaacatttggattgctttcaggcctaaggtgaaaaaggaaatatcttcccataaaaactagacagaagcattctcagaaacttgtttgtgatgtgtgccctctactgacagagttgaacctttctttgcaaagagcagttttgaaacactctttttgtagaatctgcaagaggatatttggatagctttgaagatttcttgggaaacgggaatgtcttcagataaactctagacagaagcattctcagaaacttctttgggatgtttcaattgaagtcacagtgttgaacattccctttcacagagcaggtttgaaacactctttttgtagtgtctataagtgaacatttggcgtgctttcaggcctaacgtgaaaaaggaaatatcttcccataaaaactagacagaaagcattctcagaaacttgttcttgatgtgtcccctctactgacagagttgaacctttctttgcaaagagcagctttgaaacactctttttgtagaatctgcaagaggatatttggatagcttggaggatttcgttggaaacgggtatgtcttcagataaactccagacagaagcattctcagaaacttctttgggatgttgcattcaagtcacagagtagaacattcccattcatagagcagatttgaaacactctttttgtagtatctggaagtggacatttggagcgctttcaggcctatgttgaaaaaggaaatatcttcccataaaaactagacggaagcattctcagaaacttacttgtgatgtgtttgctcaactaacagaattgaaccatcgttttgaaggagcagttttgaaacactgttttcgtggaatctgcaagtggatatttggctagctttgaggatttcgttggaaacgggattacatataaaaaggagacagcaacattctcagaaacttctttgtgatgtctgcattcaagtcacagagttgagcattccctttcatagagcaggttggaaacactctttttgtagtatctggatgaggacatttggatcgctttcaggcgtatggtgaaaaaggaaatatcttcccgtaaaaactagacagaagcattctcagaaatttatttgtgatgtgtgccctcaactaaccgagttgaacctttcttttgatagagcagttttgaaacactctttttgtaaaatctgcaagaggatatttggatagctttgaggatttcgttgcaaacgggaatggcttcatataaactctagacagaagcattctcagaaacttcgttgggatgtttcgattgaagtcccagtgttgaacattcccttttatagagcaggttggaaacactctttctgcattccctggaagtggacatttggagcgctttctggacgacggtgaaaatggaaatatcttccaagaaaatctagatagaagcaacgtcagaaacttttctgtgatggatctactcagctaacagagttgaacctttcttttgagagagcagttttgcaacactctttttgtggaatatgcaagtggatattagggcagctttgaggatttcgttggaaacgggaatacatgtaaaaagcagacagcagcattctcagaaacttctttgtgatgtttgcattgaagtcacagagttgaacattccctttgagagagcaggtttgaaacacgccttttgtcatatctggaagtgtccattcggagcgcattcaggcttgtgttgaaaaaggaaatatcctcccataaaaactagacagaagcattctcagaaacttatctgtgatgtatgtactcaactaacagaactaaaccatcgttttgaaggagcagttttgaaacactctttttgcggaatctgcaagtggatatttggctagctgggaggatttcgttggaaacgggattacatacaaaaagcagacagcagcattctcagaaacttctttgtgatgtttgcattcaagtcacagagttgaacattccctttcatagagcaggtttgaaacactctttttgtagtatctggatgtggacatttggatcgctttcaggcctatggtgaaaaaggaaatatcttcccatgaaaactagacagaagcattctcagaaacttatttgtgatgtgtgccctcaactgacagtgttgaacctttgttttgatagagcagttctgaaacacactttttgtaaaatctgcaagaggatatttggatagctttgaggatttcgttggaaacgggaatgtcttcatgtaaactctagacagaagcattctcagaaactgctttgggatgtttcaattgaagtcccagtgttgaacattccctttcatagagcaggtttgaaacactctttttgtactatctggaagtggacatttggagcgctttcaggtctacggtgaaaaaggagatatcttccaataaaaactagatagaagcaatgtcagaacttttttcatgatgtatctactcagcaaacagagttgaacctttcttttgagagagcagttttgacacagtctttgtggaatatgcaagtgggtattaggccagcttggaggatttcgttggaaacgggaatacgtataaaaagcagacagcagcattgtcagaaactactttgtgatgtttgcattcaagtcacagaattgaacactccctttcacagagcaggtttgaaacactctttttgtagtgtctgtaagtgaacatttggattgctttcaggcctaaggtgaaaaaggtaatatcttcccataaaaactagacagaagcattctcagaaacttgtttgtgatgtgtgccctctactgacagagttgaacctttctttgcaaagagcagttttgaaacactctttttgtagaatcagcaagaggatatttggatagatttgaggatttcttgggaaacgggaatgtcttcagataaactctagacagaagcattctcagaaacttctttgggatgtttcaattgaagtcacagtgttgaacattccctttcacagagcaggtttgaaacactctttttgtagtgtctataagtgaacatttggcgtgctttcaggcgtaacgtgaaaaaggaaatatcttcccatataaactagacagaagcattctcagaaacttgttcttgatgtgtcccctctactgacagagttgaacctttctttgcaaagagcagctttgaaacactctttttgtaggatctgcaagaggatatttggatagcttggaggatttcgttggaaacgggtatgtcttcagataaactctagacagaagcattctcagaaacttctttgggatgttgcattcaagtcacagagtagaacattcccattcatagagcagatttgaaacactctttttgtagtatctggaagtggacatttggagcgctttcaggcctatgttgaaaaaggaaatatcttcccataaaaactacacggaagcattctcagaaacttatttgtgatgtgtttgctcaactaacaggattgaaccatcgttttgaaggagcagttttgaaacactgttttcgtggaatctgcaagtggatatttggctagctttgaggatttcgttggaaacgggattacatataaaaaggagacagcagcattctcagaaacttctttgtgatgtctgcattcaattcacagagttgagcattccctttcatagagcaggttggaaacactctttttgtagtatctggatgaggacatttggagcgctttcaggcgtatggtgaaaaaggaaatatcttcccgtaaaaactagacagaagcattctcagaagtttatttgtgatgtgtgccctcaactaacagagttgaacctttcttttgatagagcagttttgaaacactcttttcgtaaaatctgcaagaggatatttggatagctttgaggatttcgttgcaaacgggaatggcttcatataaactctagacagaagcattctcagaaacttcgttgggatgtttcgattgaagtcccagtgttgaacattcccttttatagagcaggttggaaacactctttctgcattccctggaagtggacatttggagcgctttcaggacgacggtgaaaatggaaatatcttccaagaaaatctagatagaagcaacgtcagaaacttttctgtgatggatctactcagctaacagagttgaacctttcttttgagagagcagttttgcaacactctttttgtggaatatgcaagtggatattagggcagctttgaggatttcgttggaaacgggaatacatgtaaaaagcagacagcagcattctcagaaacttctttgtgatgtttgcattgaagtcacagagttgaacattccctttgagagagcaggtttgaaacacgccttttgtcatatctggaagtgtccattcggagcgcattcaggcttgtgttgaaaaaggaaatatcctcccataaaaactagacagaagcattctcagaaacttatctgtgatgtatgtactcaactaacagaactaaaccatcgttttgaaggagcagttttgaaacactctttttgcggaatctgcaagtggatatttggctagctgggaggatttcgttggaaacgggattacatacaaaaagcagacagcagcattctcagaaacttctttgtgatgtttgcattcaagtcacagagttgaacattccctttcatagagcaggtttgaaacactctttttgtagtatctggatgtggacatttggatcgctttcaggcctatggtgaaaaaggaaatatcttcccatgaaaactagacagaagcattctcagaaacttatttgtgatgtgtgccctcaactgacagtgttgaacctttgttttgatagagcagttctgaaacacactttttgtaaaatctgcaagaggatatttggatagctttgaggatttcgttggaaacgggaatgtcttcatgtaaactctagacagaagcattctcagaaactgctttgggatgtttcaattgaagtcccagtgctgaacattccctttcatagagcaggtttgaaacactctttttgtactatctggaagtggacatttggagcgctttcaggtctacggtgaaaaaggagatatcttccaataaaaactagatagaagcaatgtcagaacttttttcatgatgtatctactcagcaaacagagttgaacctttcttttgagagagcagttttgaaacactctttttgtggaatatgcaagtgggtattaggccagcttggaggatttcgttggaaacgggaatacgtataaaaagcagacagcagcattgtcagaaactactttgtgatgtttgcattcaagtcacagaattgaacactccctttcacagagcaggtttgaaacactctttttgtagtgtctataagtgaacatttggcgtgctttcaggcctaaggtgaaaaaggaaatatcttcccataaaaactagacagaagcattctcagaaacttgtttgtgatgtgtgccctctactgacagagttgaacctttctttgcaaagagcagctttgaaacactctttttgtagaatctgcaagaggatatttggatagctttgaggatttcgttggaaacgggtatgtcttcagataaactctagacagaagcattctcagaaacttctttgggatgttgcattcaagtcacagagtagaacattcccattcatagagcagatttgaaacactctttttgtagtatctggaagtggacatttggagcgctttcaggcctatgttgaaaaaggaaatatcttcccataaaaactagacggaagcattctcagaaacttacgtgtgatgtgtttgctcaactaacagaattgaaccatcgttttgaaggagcagttttgaaacactgttttcgtggaatctgcaagtggatatttggctagctttgaggatttcgttggaaacgggattacaaataaaaaggagtcagcagcattctcagaaactgctttgggatgtttcaattgaagtcacagtgttgaacattccctttcatagagcaggtttgaaacactctttttgtagtatctggatgaggacatttggagcgctttcaggcgtatggtgaaaaaggaaatatcttcccgtaaaaactagacagaagcattctcagaaatttatttgtgatgtgtgccctcaactaacagagttgaacctttcttttgatagagcagttttgaaacactctttttgtaaaatctgcaagaggatatttggatagctttgaggatttcgttgcaaacgggaatggcttcatataaactctagacagaagcattctcagaaacttcgttgggatgtttcgattgaagtcccagtgttgaacattcccttttatagagcaggttggaaacactctttctgcattccctggaagtggacatttggagcgctttcaggacgacggtgaaaatggaaatatcttccaagaaaatctagatagaagcaatgtcagaaacttttatgtgatggatctactcagctaacagagttgaacctttcttttgagagagcagttttgcaacactctttttgtggaatatgcaagtggatattagggcagctttgaggatttcgttggaaacgggaatacatgtaaaaagcagacagcagcattctcagaaacttctttgtgatgtttgcattgaagtcacagagttgaacattccctttgagagagcaggtttgaaacacgccttttgtcatatctggaagtgtccattcggagcgcattcaggcttgtgttgaaaaaggaaatatcctcccataaaaactagacagaagcattctcagaaagttatcagtgatgtatgtactcaactaacagaactaaaccatcgttttgaaggagcagttttgaaacactctttttgcggaatctgcaagtggatatttggctagctgggaggatttcgttggaaacgggattacatacaaaaagcagacagccaagcattctcagtaaacttatttgtgatgtgtgccctcaactgacagtgttgaacctttgttttgatagagcagttctgaaacacactttttgtaaaatctgcaagaggatatttggatagctttgaggatttcgttggaaacgggaatgtcttcatgtaaactctagacagaagcattctcagaaactgctttgggatgtttcaattgaagtcccagtgttgaacattccctttcatagagcaggtttgaaacactctttttgtactatctggaagtggacatttggagcgctttcaggtctacggtgaaaaaggagatatcttccaataaaaactagatagaagcaatgtcagaacttttttcatgatgtatctactcagcaaacagagttgaacctttcttttgagagagcagttttgaaacactctttttgtggaatatgcaagtgggtattaggccagcttggaggatttcgttggaaacgggaatacgtataaaaagcagacagcagcattgtcagaaactactttgtgatgtttgcattcaagtcacagaattgaacactccctttcacagagcaggtttgaaacactctttttgtagtgtctgtaagtgaacatatggattgctttcaggcctaaggtgaaaaaggaaatatcttcccataaaaactagacagaagcattctcagaaacttgtttgtgatgtgtgccctctactgacagagttgaacctttctttgcaaagagcagttttgaaacactctttttgtagaatctgcaagaggatatttggatagctttgaagatttcttgggaaacgggaatgtcttcagataaactctagacagaagcattctcagaaacttctttgggatgtttcaattgaagtcacagtgttgaacattccctttcacagagcaggtttgaaacactctttttgtagtgtctataagtgaacatttggcgtgctttcaggcctaacgtgaaaaattaaatatcttcccataaaaactagacagaagcattctcagaaacttgttcatgatgtgtgccctctactgacagagttgaacctttctttgcaaagagcagctttgaaacactctttttgtagaatctgcaagaggatatttggatagctttgaggatttcgttggaaacgggtatgtcttcagataaactctagacagaagcattctcagaaacttctttgggatgttgcattcaagtcacagagtagaacattcccattcatagagcagatttgaaacactctttttgtagtatctggaagtggacatttggagcgctttcaggcctatgttgaaaaaggaaatatcttcccataaaaactagacggaagcattctcagaaacttacttgtgatgtgtttgctcaactaacagaattgaaccatcgttttgaaggagcagttttgaaacactgttttcgtggaatctgcaagtggatatttggctagctttgaggatttcgttggaaacgggattacatataaaaaggagacagcagcattctcagaaacttctttgtgatgtctgcattcaagtcacagagttgagcattccctttcatagagcaggttggaaacactctttttgtagtatctggatgaggacatttggagcgctttcaggcctatggtgaaaaaggaaatatcttcccgtaaaaactagacagaagcattctcagaaatttatttgtgatgtgtgccctcaactaacagagttgaacctttcttttgatagagcagttttgaaacactctttttgtaaaatctgcaagaggatatttggatagctttgaggatttcgttgcaaacgggaatggcttcatataaactctagacagaagcattctcagaaacttcgttgggatgtttcgattgaagtcccagtgttgaacattcccttttatagagcaggttggaaacactctttctgcattccctggaagtggacatttggagcgctttcaggacgacggtgaaaatggaaatatcttccaagaaaatctagatagaagcaacgtcagaaacttttatgtgatggatctactcagctaacagagttgaacctttcttttgagagagcagttttgcaacactctttttgtggaatatgcaagtggatattagggcagctttgaggatttcgttggaaacgggaatacatgtaaaaagcagacagcagcgttctcagaaacttctttgtgatgtttgcattgaagtcacagagttgaacattccctttgagagagcaggtttgaaacacgccttttgtcatatctggaagtgtccattcggagcgcattcaggcttgtgttgaaaaaggaaatatcctcccataaaaactagacagaagcattctcagaaacttatctgtgatgtatgtactcaactaacagaactaaaccatcgttttgaaggagcagttttgaaacactctttttgcggaatctgcaagtggatatttggctagctgggaggatttcgttggaaacgggattacatacaaaaagcagacagcagcattctcagaaacttctttgtgatgtttgcattcaagtcacagagttgaacattccctttcatagagcaggtttgaaacactctttttgtagtatctggatgtggacatttggatcgctttcaggcctatggtgaaaaaggaaatatcttcccatgaaaactagacagaagcattctcagaaacttatttgtgatgtgtgccctcaactgacagtgttgaacctttgttttgatagagcagttctgaaacacactttttgtaaaatctgcaagaggatatttggatagctttgaggatttcgttggaaacgggaatgtcttcatgtaaactctagacagaagcattctcagaaactgctttgggatgtttcaattgaagtcccagtgttgaacattccctttcatagagcaggtttgaaacactctttttgtactatctggaagtggacatttggagcgctttcaggtctacggtgaaaaaggagatatcttccaataaaaactagatagaagcaatgtcagaacttttttcatgatgtatctactcagcaaacagagttgaacctttcttttgagagagcagttttgacacagtctttgtggaatatgcaagtgggtattaggccagcttggaggatttcgttggaaacgggaatacgtataaaaagcagacagcagcattgtcagaaactactttgtgatgtttgcattcaagtcacagaattgaacactccctttcacagagcaggtttgaaacactctttttgtagtgtctgtaagtgaacatttggattgctttcaggcctatggtgaaaaaggtaatatcttcccataaaaactagacagaagcactctcagaaacttgtttgtgatgtgtgccctctactgacagagttgaacctttctttgcaaagagcagttttgaaacactccttttgtagaatctgcaagaggatatttggatagctttgaggatttcttgggaaacgggaatgtcttcagataaactctagacagaagcattctcagaaacttctttgggatgtttcaattgaagtcacagtgttgaacattccctttcacagagcaggtttgaaacactctttttgtagtgtctataagtgaacatttggcgtgctttcaggcgtaacgtgaaaaaggaaatatcttcccataaaaactagacagaagcattctcagaaacttgttcttgatgtgtcccctctactgacagagttgaacctttctttgcaaagagcagctttgaaacactctttttgtagaatctgcaagaggatatttggatagcttggaggatttcgttggaaacgggtatgtcttcagataaactctagacagaagcattctcagaaacttctttgggatgttgcattcaagtcacagagtagaacattcccattcatagagcagatttgaaacactctttttgtagtatctggaagtggacatttggagcgctttcaggcctatgttgaaaaaggaaatatcttcccataaaaactagacggaagcattctcagaaacttatttgtgatgtgtttgctcaactaacaggattgaaccatcgttttgaaggagcagttttgaaacactgttttcgtggaatctgcaagtggatatttggctagctgggaggatttcgttggaaacgggattacatataaaaaggagacagcagcattctcagaaacttctttgtgatgtctgcattcaattcacagagttgagcattccctttcatagagcaggttggaaacactctttttgtagtatctggatgaggacatttggagcgctttcaggcgtatggtgaaaaaggaaatatcttcccgtaaaaactagacagaagcattctcagaagtttatttctgatgtgtgccctcaactaacagagttgaacctttcttttcatagagcagttttgaaacactctttttgtaaaatctgcaagaggatatttggatagctttgaggatttcgttgcaaacgggaatggcttcatataaactctagacagaaagcattctcagaaacttcgtcgggatgtttcgattgaagtcccagtgttgaacattcccttttatagagcaggttggaaacactctttctgcattccctggaagtggacaattggagcgctttcaggacgacggtgaaaatggaaatatcttccaataaaatctggatagagcaaccgtcagaaacttttctgtgatggatctactcagctaacagagttgaacctttcttttgagagagcagttttgcaacactctttttgtggaatatgcaagtggatattagggcagctttgaggatttcgttggaaacgggaatacatgtaaaaagcagacagcagcattctcagaaacttctttgtgatgtttgcattgaagtcacagagttgaacattccctttgagagagcaggtttgaaacacgccttttgtcatatctggaagtgtccattcggagcgcattcaggcttgtgttgaaaaaggaaatatcctcccataaaaactagacagaagcattctcagaaacttatctgtgatgtatgtactcaactaacagaactaaaccatcgttttgaaggagcagttttgaaacactctttttgcggaatctgcaagtggatatttggctagctgggaggatttcgttggaaacgggattacatacaaaaagcagagagcagcattctcagaaacttctttgtgatgtttgcattcaagtcacagagttgaacattccctttcatagagcaggtttgaaacactctttttgtagtatctggatgtggacatttggatcgctttcaggcctatggtgaaaaaggaaatatcttcccatgaaaactagacagaagcattctcagaaacttatttgtgatgtgtgccctcaactgacagtgttgaacctttgttttgatagagcagttctgaaacacactttttgtaaaatctgcaagaggatatttggatagatttgaggatttcgttggaaacgggaatgtcttcatgtaaactctagacagaagcattctcagaaactgctttgggatgtttcaattgaagtcccagtgttgaacattccctttcatagagcaggtttgaaacactctttttgtactatctggaagtggacatttggagcgcttcaggtctacggtgaaaaaggagatatcttccaataaaaactagatagaagcaatgtcagaacttttttcatgatgtatctactcagctaacagagttgaacctttcttttgagagagcagttttgaaacactctttgtgtggaatatgcaagtgggtattaggccagcttggaggatttcgttggaaacgggaatacgtataaaaagcagccagcagcattgtcagaaactactttgtgatgtttgcattcaagtcacagaattgaacactccctttcacagtagcaggtttgaaacactctttttgtagtgtctgtaagtgaacatttggattgctttcaggcctaaggtgaaaaaggaaatatcttcccataaaaactagacagaagcattctcagaaacttgtttgtgatgtgtgccctctactgacagagttgaacctttctttgcaaagagcagttttgaaacactctttttgtagaatctgcaagaggatatttggatagctttgaggatttcttgggaaacgggaatgtcttcagataaactctagacagaagcattctcagaaacttctttgggatgtttcaattgaagtcacagtgttgaacattccctttcacagagcaggtttgaaacactctttttgtagtgtctataagtgaacatttggcgtgctttcaggcctaacgtgaaaaaggaaatatcttcccataaaaactagacagaagcattctcagaaacttgttcgtgatgtgtgccctctactgacagagttgaacctttctttgcaaagagcagctttgaaacactctttttgtagaatctgcaagaggatatttggatagctttgaggatttcgttggaaacgggtatgtcttcagataaactctagacagaagcattctcagaaacttctttgggatgttgcattcaagtcacagagtagaacattcccattcatagagcagatttgaaacactctttttgtagtatctggaagtggacatttggagcgctttcaggcctatgttgaaaaaggaaatatcttcccataaaaactagacggaagcattctcagaaacttacttgtgatgtgtttgctcaactaacagaattgaaccatcgttttgaaggagcagttttgaaacactgttttcgtggaatctgcaagtggatatttggctagctttgaggatttcgttggaaacgggattacatataaaaaggagacagcagcattctcagaaacttctttgtgatgtctgcattcaagtcacagagttgagcattccctttcatagagcaggttggaaacactctttttgtagtatctggatgaggacatttggagcgctttcaggcgtatggtgaaaaaggaaatatcttcccgtaaaaactagacagaagcattctcagaaatttatttgtgatgtgtgccctcaactaacagagttgaacctttcttttgatagagcagttttgaaacactctttttgtaaaatctgcaagaggatatttggatagctttgaggatttcgttgcaaacgggaatggcttcatataaactctagacagaagcattctcagaaacttcgttgggatgtttcgattgaagtcccagtgttgaacattcccttttatagagcaggttggaaacactctttctgcattccctggaagtggacatttggagcgctttcaggacgacggtgaaaatggaaatatcttccaagaaaatctagatagaagcaacgtcagaaacttttctgtgatggatctactcagctaacagagttgaacctttcttttgagagagcagttttgcaacactctttttgtggaatatgcaagtggatattagggcagctttgaggatttcgttggaaacgggaatacatgtaaaaagcagacagcagcattctcagaaacttctttgtgatgtttgcattgaagtcacagcagttgaacattccctttgagagagcaggtttgaaacacgccttttgtcatatctggaagtgtccattcggagcgcattcaggcttgtgttgaaaaaggaaatatcctcccataaaaactagacagaaagcattctcaggaaacttatctgtgatgtatgtactcaactaacagaactaaaccatcgttttgaaggagcagttttgaaacactctttttgcagaatctgcaagtggatatttggctagctgggaggatttcgttggaaacgggattacatacaaaaagcagagagcagcattctcagaaacttctttgtgatgtttgcattcaagtcacagagttgaacattccctttcatagagcaggtttgaaacactctttttgtagtatctggatgtggacatttggatcgctttcaggcctatggtgaaaaaggaaatatcttcccatgaaaactagacagaagcattctcagaaacttatttgtgatgtgtgccctcaactgacagtgttgaatctttgttttgatagagcagttctgaaacacactttttgtaaaatctgcaagaggatatttggatagctttgaggatttcgttggaaacgggaatgtcttcatgtaaactctacacagaagcattctcagaaactgctttgggatgtttcaattgaagtcccagtgttgaacattcccattcatagagcaggtttgaaacactctttttgtactatctggaagtggacatttggagcgctttcaggtctacggtgaaaaaggagatatcttccaataaaaactagatagaagcaatgtcagaacttttttcatgatgtatctactcagctaacagtagttgaacctttcttttgagagagcagttttgaaacactctttgtgtggaatatgcaagtgggtattaggccagcttggaggatttcgttggaaacgggaatacgtataaaaagcagacagcagcattgtcagaaactactttgtgatgtttgcattcaagtcacagaattgaacactccctttcacagagcaggtttgaaactctctttttgtagtgtctgtaagtgaacatttggcgtgctttcaggcgtaacgtgaaaaaggaaatatcttcccataaaaactagacagaagcattctcagaaacttgttcttgatgtgtgccctctactgacagagttgaacctttctttgcaaagagcagttttgaaacactctttttgtagaatctgcaagaggatatttggatagctttgaggatttcttgggaaacgggaatgtcttcagataaactctagacagaagcattctcagaaacttctttgggatgtttcaattgaagtcacagtgttgaacattccctttcacagagcaggtttgaaacactctttttgtagtgtctataagtgaacatttggcgtgctttcaggcctaacgtgaaaaaggaaatatcttcccataaaaactagacagaagcattctcagaaacttgttcgtgatgtgtgccctctactgacagagttgaacctttctttgcaaagagcagttttgaaacacactttttgtagaatctgcaagaggatatttggatagctttgaggatttcgttggaaacgggtatgtcttcagataaactctagacagaagcattctcagaaacttctttgggatgttgcattcaagtcacagagtagaacattcccattcatagagcagatttgaaacactctttttgtagtatctggaagtggacatttggagcgctttcaggcctatgttgaaaaaggaaatatcttcccataaaaactagacggaagcattctcagaaacttacttgtgatgtgtttgctcaactaacagaattgaaccatcgttttgaaggagcagttttgaaacactgttttcgtggaatctgcaagtggatatttggctagctttgaggatttcgttggaaacgggattacatataaaaaggagacagcagcattctcagaaacttctttgtgatgtctgcattcaagtcacagagttgagcattccctttcatagagcaggttggaaacactctttttgtagtatctggatgaggacatttggagcgctttcaggcgtatggtgaaaaaggaaatatcttcccgtaaaaactagacagaagcattctcagaaatttatttgtgatgtgtgccctcaactaacagagttgaacctttcttttgatagagcagttttgaaacactctttttgtaaaatctgcaagaggatatttggatagctttgaggatttcgttgcaaacgggaatggcttcatataaactctagacagaagcattctcagaaacttcgttgggatgtttcgattgaagtcccagtgttgaacattcccttttatagagcaggttggaaacactctttctgcattccctggaagtggacatttggagcgctttcaggacgacggtgaaaatggaaatatcttccaagaaaatctagatagaagcaacgtcagaaacttttctgtgatggatctactcaagctaacagagttgaacctttcttttgagagagcagttttgcaacactctttttgtggaatatgcaagtggatattagggcagctttgaggatttcgttggaaacgggaatacatgtaaaaagcagacagcagcattctcagaaacttctttgtgatgtttgcattgaagtcacagagttgaacattccctttgagagagcaggtttgaaacacgccttttgtcatatctggaagtgtccattcggagcgcattcaggcttgtgttgaaaaaggaaatatcctcccataaaaactagacagaagcattctcagaaacttatctgtgatgtatgtactcaactaacagaactaaaccatcgttttgaaggagcagttttgaaacactctttttgcggaatctgcaagtggatatttggctagctgggaggatttcgttggaaacgggattacatacaaaaagcagacagcagcattctcagaaacttctttgtgatgtttgcattcaagtcacagagttgaacattccctttcatagagcaggtttgaaacactctttttgtagtatctggatgtggacatttggatcgctttcaggcctatggtgaaaaaggaaatatcttcccatgaaaactagacagaagcattctcagaaacttatttgtgatgtgtgccctcaactgacagtgttgaacctttgttttgatagagcagttctgaaacacactttttgtaaaatctgcaagaggatatttggatagctttgaggatttcgttggaaacgggaatgtcttcatgtaaactctacacagaagcattctcagaaactgctttgggatgtttcaattgaagtcccagtgttgaacattcccattcatagagcaggtttgaaacactctttttgtactatctggaagtggacatttggagcgctttcaggtctacggtgaaaaaggagatatcttccaataaaaactagatagaagcaatgtcagaacttttttcatgatgtatctactcagctaacagagttgaacctttcttttgagagagcagttttgaaacactctttgtgtggaatatgcaagtgggtattaggccagcttggaggatttcgttggaaacgggaatacgtataaaaagcagacagcagcattgtcagaaactactttgtgatgtttgcattcaagtcacagaattgaacactccctttcacagagcaggtttgaaacactctttttgtagtgtctgtaagtgaacatatggattgctttcaggcctaaggtgaaaaaggaaatatcttcccataaaaactagacagaagcattctcagaaacttgtttgtgatgtgtgccctctactgacagagttgaacctttctttgcaaagagcagttttgaaacactctttttgtagaatctgcaagaggatatttggatagctttgaagatttcttgggaaacgggaatgtcttcagataaactctagacagaagcattctcagcaaacttctttgggatgtttcaattgaagtcacagtgttgaacattccctttcacagagcaggtttgaaacactctttttgtagtgtctataattgaacatttggcgtgctttcaggcctaacgtgaaaaaggaaatatcttcccataaaaactagacagaagcattctcagaaacttgttcgtgatgtgtgccctctactgacagagttgaacctttctttgcaaagagcagctttgaaacacactttttgtagaatctgcaagaggatatttggatagctttgaggatttcgttggaaacgggtatgtcttcagataaactctagacagaagcattctcagaaacttctttgggatgttgcattcaagtcacagagtagaacattcccattcatagagcagatttgaaacactctttttgtagtatctggaagtggacatttggagcgctttcaggcctatgttgaaaaaggaaatatcttcccataaaaactagacggaagcattctcagaaacttatttgtgatgtgtttgctcagctaacaggattgaaacatcgttttgaaggagcagttttgaaacactgttttcgtggaatctgcaagtggatatttggctagctgggaggatttcgttggaaacgggattacatataaaaaggagacagccagcattctcagaaacttctttgtgatgtttgcattcaattcacagagttgagcattccctttcatagagcaggttggaaacactctttttgtagtatctggatgtggacatttggatcgctttcaggcctatggtgaaaaaggaaatatcttcccatgaaaactagacagagcattctcagaaatttatttgtgatgtgtgccctcaactaacagagttgaacctttcttttgatagagcagttttgaaacactctttttgtaaaatctgcaagaggatatttggatagctttgaggatttcgttgcaaacgggaatggcttcatataaactctagacagaagcattctcagaaacttcgttgggatgtttcgattgaagtcccagtgttgaacattcccttttatagagcaggttggaaacactctttctgcattccctggaagtggacatttggagcgctttcaggacgacggtgaaaatgaaaatatcttccaagaaaatctagatagaagcaatgtcagaaacttttatgtgatggatctactcagctaacagagttgaacctttcttttgagagagcagttttgcaacactctttttgtggaatatgcaagtggatattagggcagctttgaggatttcgttggaaacgggaatacatgtaaaaagcagacagcagcattctcagaaacttctttgtgatgtttgcattgaagtcacagagttgaacattccctttgagagagcaggtttgaaacacgccttttgtcatatctggaagtgtccattcggagcgcattcaggcttgtgttgaaaaaggaaatatcctcccataaaaactagacagaagcattctcagaaacttatctgtgatgtatgtactcaactaacagaactaaaccatcgttttgaaggagcagttttgaaacactctttttgcggaatctgcaagtggatatttggctagctgggaggatttcgttggaaacgggattacatacaaaaagcagacagcagcattctcagaaacttctttgtgatgtttgcattcaagtcacagagttgaacattccctttcatagagcaggtttgaaacactctttttgtagtatctggatgtggacatttggatcgctttcaggcctatggtgaaaaaggaaatatcttcccatgaaaactagacagaagcattctcagaaacttatttgtgatgtgtgccctcaactgacagtgttgaacctttgttttgatagagcagttctgaaacacactttttgtaaaatctgcaagaggatatttggatagctttgaggatttcgttggaaacgggaatgtcttcatgtaaactctggacagaagcattctcagaaactgctttgggatgtttcaattgaagtcccagtgttgaacattccctttcatagagcaggtttgaaacactctttttgtactatctggaagtggacatttggagcgctttcaggtctacggtgaaaaaggagatatcttccaataaaaactagatagaagcaatgtcagaacttttttcatgatgtatctactcagcaaacagagttgaacctttcttttgagagagcagttttgaaacactctttttgtggaatatgcaagtgggtattaggccagcttggaggatttcgttggaaacgggaatacgtataaaaagcagacagcagcattgtcagaaactactttgtgatgtttgcattcaagtcacagaattgaacactccctttcacagagcaggtttgaaacactctttttgtagtgtctgtaagtgaacatttggattgctttcaggcctaaggtgaaaaaggaaatgtcttcccataaaaactagacagaagcattctcagaaacttgtttgtgatgtgtgccctctactgacagagttgaacctttctttgcaaagaccagttttgaaacactctttttgtagaatctgcaagaggatatttggatagctttgaggatttcttgggaaacgggaatgtcttcagataaactctagacagaagcattctcagaaacttctttgggatgtttcaattgaagtcacagtgttgaacattccctttcacagagcaggtttgaaacactctttttgtagtgtctataagtgaacatttggcgtgctttcaggcgtaacgtgaaaaaggaaatatcttcccataaaaactagacagaagcattctcagaaacttgttcgtgatgtgtgccctctactgacagagttgaacctttctttgcaaagagcagctttgaaacacactttttgtagaatctgcaagaggatatttggatagcttggaggatttcgttggaaacgggtatgtcttcagataaactctagacagaagcattctcagaaacttctttgggatgttgcattcaagtcacagagtagaacattcccattcatagagcagatttgaaacactctttttgcagtatctggaagtggacatttggagcgctttcaggcctatgttgaaaaaggaaatatcttcccataaaaactagacggaagcattctcagaaacttatttgtgatgtgtttgctcaactaacaggattgaaccatcgttttgaaggagcagttttgaaacactgttttcgtggaatctgcaagtggatatttggctagctttgaggatttcgttggaaacgggattacatataaaaaggagacagcagcattctcagaaacttctttgtgatgtctgcattcaattcacagagttgagcattccctttcatagagcaggttggaaacactctttttgtagtatctggatgaggacatttggagcgctttcaggcctatggtgaaaaaggaaatatcttcccgtaaaaactagacagaagcattctcagaaatttatttgtgatgtgtgccctcaactaacagagttgaacctttcttttgatagagcagttttgaaacactctttttgtaaaatctgcaagaggatatttggatagctttgaggatttcgttgcaaacgggaatggcttcatataaactctagacagaagcattctcagaaacttcgttgggatgtttcgattgaagtcccagtgttgaacattcccttttatagagcaggttggaaacactctttctgcattccctggaagtggacatttggagcgctttcaggacgacggtgaaaatggaaatatcttccaagaaaatctagatagaagcaatgtcagaaacttttatgtgatggatctactcagctaacagagttgaacctttcttttgagagagcagttttgcaacactctttttgtggaatatgcaagtggatattagggcagctttgaggatttcgttggaaacgggaatacatgtaaaaagcagacagcagcattctcagaaacttctttgtgatgtttgcattgaagtcacagagttgaacattccctttgagagagcaggtttgaaacacgccttttgtcatatctggaagtgtccattcggagcgcattcaggcttgtgttgaaaaaggaaatatcctcccataaaaactagacagaagcattctcagaaacttatctgtgatgtatgtactcaactaacagaactaaaccatcgttttgaaggagcagttttgaaacactctttttgcggaatctgcaagtggatatttggctagctgggaggatttcgttggaaacgggattacatacaaaaagcagacagcagcattctcagaaacttctttgtgatgtttgcattcaagtcacagagttgaacattccctttcatagagcaggtttgaaacactctttttgtagtatctggatgtggacatttggatcgctttcaggcctatggtgaaaaaggaaatatcttcccatgaaaactagacagaagcattctcagaaacttatttgtgatgtgtgccctcaactgacagtgttgaacctttgttttgatagagcacttctgaaacacactttttgtaaaatctgcaagaggatatttggatagctttgaggatttcgttggaaacgggaatgtcttcatgtaaactctacacagaagcattctcagaaacagctttgggatgtttcaattgaagtcccagtgttgaacattccctttcatagagcaggtttgaaacactctttttgtactatctggaagtggacatttggagcgctttcaggtctacggtgaaaaaggagatatcttccaataaaaactagatagaagcaatgtcagaacttttttcatgatgtatctactcagcaaacagagttgaacctttcttttgagagagcagttttgaaacactctttttgtggaatatgcaagtgggtattaggccagcttggaggatttcgttggaaacgggaatacgtataaaaagcagacagcagcattgtcagaaactactttgtgatgtttgcattcaagtcacagaattgaacactccctttcacagagcaggtttgaaacactctttttgtagtgtctgtaagtgaacatttggattgctttcaggcctaaggtgaaaaaggaaatatcttcccataaaaactagacagaagcattctcagaaacttgtttgtgatgtgtgccctctactgacagagttgaacctttctttgcaaagagcagttttgaaacactctttttgtagaatctggaagaggatatttggatagctttgaggatttcttgggaaacgggaatgtcttcagataaactctagacagaagcattctcagaaactgctttgggatgtttcaattgaagtcccagtgttgaacattccctttcatagagcaggtttgaaaccctctttttgtagtgtctataagtgaacatttggcgtgctttcaggcctaacgtgaaaaaggaaatatcttcccataaaaactagacagaagcattctcagaaacttgttcttgatgtgtgccctctactgacagagttgaacctttctttgcaaagagcagttttgaaacactctttttgtagaatctgcaagaggatatttggatagctttgaggatttcttgggaaacgggaatgtcttcagataaactctagacagaagcattctcagaaacttctttgggatgtttcaattgaagtcacagtgttgaacattccctttcacagagcaggtttgaaacactctttttgtagtgtctataagtgaacatttggcgtgctttcaggcgtaacgtgaaaaaggaaatatcttcccataaaaaccagacagaagcattctcagaaacttgttcttgatgtgtcccctctactgacagagttgaacctttctttgcaaagagcagctttgaaacactctttttgtagaatctgcaagaggatatttggatagctttgaggatttcgttggaaacgggtatgtcttcagataaactctagacagaagcattctcagaaacttctttgggatgttgcattcaagtcacagagtagaacattcccattcatagagcagatttgaaacactctttttgtagtatctggaagtggacatttggagcgctttcaggcctatgttgaaaaaggaaatatcttcccataaaaactagacggaagcattctcagaaacttacttgtgatgtgtttgctcaactaacagaattgaaccatcgttttgaaggagcagttttgaaacactgttttcgtggaatctgcaagtggatatttggctagctttgaggatttcgttggaaacgggattacatataaaaaggagacagcagcattctcagaaacttctttgtgctgtctgcattcaagtcacagagttgagcattccctttcatagagcaggttggaaacactctttttgtagtatctggatgaggacatttggagcgctttcaggcgtatggtgaaaaaggaaatatcttcccgtaaaaactagacagaagcattctcagaaatttatttgtgatgtgtgccctcaactaacagagttgaacctttcttttgatagagcagttttgaaacactctttttgtaaaatctgcaagaggatatttggatagctttgaggatttcgttgcaaacgggaatggcttcatataaactctagacagaagcattctcagaaacttcgttgggatgtttcgattgaagtcccagtgttgaacattcccttttatagagcaggttggaaacactctttctgcattccctggaagtggacatttggagcgctttcaggacgacggtgaaaatggaaatatcttccaagaaaatctagatagaagcaatgtcagaaacttttatgtgatggatctactcagctaacagagttgaacctttcttttgagagagcagttttgcaagactctttttgtggaatatgcaagtggatattagggcagctttgaggatttcgttggaaacgggaatacatgtaaaaagcagacagcagcattctcagaaacttctttgtgatgtttgcattgaagtcacagagttgaacattccctttgagagagcaggtttgaaacacgccttttgtcatatctggaagtgtccattcggagcgcattcaggcttgtgttgaaaaaggaaatatcctcccataaaaactagacagaagcattctcagaaacttatctgtgatgtatgtactcaactaacagaactaaaccatcgttttgaaggagcagttttgaaacactctttttgcggaatctgcaagtggatatttggctagctgggaggatttcgttggaaacgggattacatacaaaaagcagacagcagcattctcagaaacttctttgtgatgtttgcattcaagtcacagagttgaacattcccttccatagagcaggtttgaaacactctttttgtagtatctggatgtggacatttggatcgctttcaggcctatggtgaaaaaggaaatatcttcccatgaaaactagacagaagcattctcagaaacttatttgtgatgtgtgccctcaactgacagtgttgaacctttgttttgatagagcagttctgaaacacactttttgtaaaatctgcaagaggatatttggatagctttgaggatttcgttggaaacgggaatgtcttcatgtaaactctacacagaagcattctcagaaactgctttgggatgtttcaattgaagtcccagtgttgaacattcccattcatagagcaggtttgaaacactctttttgtactatctggaagtggacatttggagcgctttcaggtctacggtgaaaaaggagatatcttccaataaaaactagatagaagcaatgtcagaacttttttcatgatgtatctactcagcaaacagagttgaacctttcttttgagagagcagttttgaaacactctttttgtggaatatgcaagtgggtattaggccagcttggaggatttcgttggaaacgggaatacgtataaaaagcagacagcagcattgtcagaaactactttgtgatgtttgcattcaagtcacagaactgaacactccctttcacagagcaggtttgaaacactctttttgtagtgtctgtaagtgaacatttggattgctttcaggcctaaggtgaaaaaggaaatatcttcccataaaaactagacagaaacattctcagaaacttgtttgtgatgtgtgccctctactgacagagttgaacctttctttgcaaagaccagttttgaaacactctttttgtagaatctgcaagaggatatttggatagctttgaggatttcttgggaaacgggaatgtcttcagataaactctagacagaagcattctcagaaacttctttgggatgtttcaattgaagtcacagtgttgaacattccctttcacagagcaggtttgaaacactctttttgtagtgtctataattgaacatttggcgtgctttcaggcctaacgtgaaaaaggaaatatcttcccataaaaactagacagaagcattctcagaaacttgttcgtgatgtgtgccctctactgacagagttgaatctttctttgcaaagagcagctttgaaacactctttttgtagaatctgcaagaggatatgtggatagctttgaggatttcgttggaaacgggtatgtcttcagataaactctagacagaagcattctcagaaacttctttgggatgtttcaattgaagtcacagtgttgaacattccctttcacagagcaggtttgaaacactctttttgtagtgtctataagtgaacatttggcgtgcttcaggcctaacgtgaaaaaggaaatatcttcccataaaaactagacagataagcattctcagaaacttgttcgtgatgtgtgccctctactgacagagttgaacctttctttgcaaagagcagctttgaaacacactttttgtagaatctgcaagaggatatttggatagctttgaggatttcgttggaaacgggtatgtcttcagataaactctagacagaagcattctcagaaacttctttgggatgttgcattcaagtcacagagtagaacattcccattcatagagcagatttgaaacactctttttgtagtatctggaagtggacatttggagcgctttcaggcctatgttgaaaaaggaaatatcttcccataaaaactagacggaagcattctcagaaacttatttgtgatgtgtttgctcaactaacaggattgaaccatcgttttgaaggagcagttttgaaacactgttttcgtggaatctgcaagtggatatttggctagctttgaggatttcgttggaaacgggattacatatacaaaggagacagcagcattctcagaaacttctttgtgatgtctgcattcaattcacagagttgagcattccctttcatagagcaggttggaaacactctttttgtagtatctggatgaggacatttggagcgctttcaggcgtatggtgaaaaaggaaatatcttcccgtaaaaactagacagaagcattctcagaagtttatttgtgatgtgtgccctcaactaacagagttgaacctttcttttgatagagcagttttgaaacactctttttgtaaaatctgcaagaggatatttggatagctttgaggatttcgttgcaaacgggaatggcttcatataaactctagacagaagcattctcagaaacttcgttgggatgtttcgattgaagtcccagtgttgaacattcccttttatagagcaggttggaaacactctttttgcattccctggaagtggacatttggagcgctttcaggacgacggtgaaaatggaaatatcttccaagaaaatctagatagaagcaatgtcagaaacttttatgtgatggatctactcagctaacagagttgaacctttcttttgagagagcagttttgcaacactctttttgtggaatatgcaagtggatattagggcagctttgaggatttcgttggaaacgggaatacatgtaaaaagcagacagcagcattctcagaaacctctttgtgatgtttgcattgaagtcacagagttgaacattccctttgagagagcaggtttgaaacacgccttttgtcatatctggaagtgtccattcggagcgcattcaggcttgtgttgaaaaaggaaatatcctcccataaaaactatacagaagcattctcagaaacttatttgtgatatatgtactcaactaacagaactaaaccatcgttttgaaggagcagttttgaaacactctttttgcggaatctgcaagtggatatttggctagctgggaggatttcgttggaaacgggattacatagaaaaagcagacagcagcattctcagaaacttatttgtgatgtgtgccctcaactgacagtgttgaacctttgttttgatagagcagttctgaaacacactttttgtaaaatctgcaagaggatatttggatagctttgaggatttcggtggaaacgggaatgtcttcatgtaaactctagacagaagcattctcagaaactgctttgggatgtttcaattgaagtcccagtgttgaacattccctttcatagagcaggtttgaaacactctttttgtactatctggaagtggacatttggagcgctttcaggtctacggtgaaaaaggagatatcttccaataaaaactagatagaagcaatgtcagaacttttttcatgatgtatctactcagcaaacagagttgaacctttcttttgagagagcagttttgaaacactctttttgtggaatatgcaagtgggtattaggccagcttggaggatttcgttggaaacgggaatacgtataaaaagcagacagcagcattgtcagaaactactttgtgatgtttgcattcaagtcacagaattgaacactccctttcacagagcaggtttgaaacactctttttgtagtgtctgtaagtgaacatttggattgctttcaggcctaaggtgaaaaaggaaatatcttcccataaaaactagacagaagcattctcagaaacttgtttgtgatgtgtgccctctactgacagagttgaacctttctttgcaaagagcagttttgaaacactcttcttgtagaatctgcaagaggatatttggatagctttgaggatttcttgggaaacgggaatgtcttcagataaactctagacagaagcattctcagaaacttctttgggatgtttcaattgaagtcacagtgttgaacattccctttcacagagcaggtttgaaacactctttttgtagtgtctataagtgaacatttggcgtgctttcaggcctaacgtgaaaaaggaaatatcttcccataaaaactagacagaagcattctcagaaacttgttcgtgatgtgtgccctctactgacagagttgaacctttctttgcaaagagcagctttgaaacactctttttgtagaatctgcaagaggatatttggatagctttgaggatttcgttggaaacgggtatgtcttcagataaactctagacagaagcattctcagaaacttctttgggatgttgcatgcaagtcacagagtagaacattcccattcatagagcagatttgaaacactctttttgtagtatctggaagtggacatttggagcgctttcaggcctatgttgaaaaaggatatatcttcccataaaaactagacggaagcattctcagaaacttacttgtgatgtgtttgctcaactaacagaattgaaccatcgttttgaaggagcagttttgaaacactgttttcgtggaatctgcaagtggatatttggctagctttgaggatttcgttggaaacgggattacatataaaaaggagacagcagcattctcagaaacttctttgtgatgtctgcattcaagtcacagagttgagcattctctttcatagagcaggttggaaacactctttttgtagtatctggatgaggacatttggagagctttcaggcgtatggtgaaaaaggaaatatcttcccgtaaaaactagacagaagcattctcagaaatttatttgtgatgtgtgccctcaactaacagagttgaacctttcttttgatagagcagttttgaaacactctttttgtaaaatctgcaagaggatatttggatagctttgaggatttcgttgcaaacgggaatggcttcatataaactctagacagaagcattctcagaaacttcgttgggatgtttcgattgaagtcccagtgttgaacattcccttttatagagcaggttggaaacactctttctgcattccctggaagtggacatttggagcgctttcaggacgacggtgaaaatggaaatatcttccaagaaaatctagatagaagcaatgtcagaaacttttatgtgatggatctactcagctaacagagttgaacctttcttttgagagagcagttttgcaacactctttttgtggaatatgcaagtggatatttgggcagctttgaggatttcgttggaaacgggaatacatgtaaaaagcagacagcagcattctcagaaacttctttgtgatgtttgcattgaagtcacagagttgaacattccctttgagagagcaggtttgaaacacgccttttgtcatatctggaagtgtccattcagagcgcattcaggcttgtgttgaaaaaggaaatatcctcccataaaaactagacagaagcattctcagaaacttatctgtgatgtatgtactcaactaacagaactaaaccatcgttttgaaggagcagttttgaaacactctttttgcggaatctgcaagtggatatttggctagctgggaggatttcgttggaaacgggattacatacaaaaagcagacagcagcattctcagaaacttctttgtgatgtttgcattcaagtcacagagttgaacattccctttcatagagcaggtttgaaacactctttttgtagtatctggatgtggacatttggatcgctttcaggcctatggtgaaaaaggaaatatcttcccatgaaaactagacagaagcattctcagaaacttatttgtgatgtgtgccctcaactgacagtgttgaacctttgttttgatagagcagttctgaaacacactttttgtaaaatctgcaagaggatatttggatagctttgaggatttcgttggaaacgggaatgtcttcatgtaaactctacacagaagcattctcagaaactgctttgggatgtttcaattgaagtcccagtgttgaacattcccattcatagagcaggtttgaaacactctttttgtactatctggaagtggacatttggagcgctttcaggtctacggtgaaaaaggagatatcttccaataaaaactagatagaagcaatgtcagaacttttttcatgatgtatctactcagctaaccgagttgaacctttcttttgagagagcagttttgaaacactctttttgtggaatatgcaagtgggtattaggccagcttggaggatttcgttggaaacgggaatacgtataaaaagcagacagcagcattgtcagaaactactttgtgatgtttgcattcaagtcacagaattgaacactccctttcacagagcaggtttgaaacactctttttgtagtgtctataagtgaacatttggcgtgctttcaggcctaaggtgaaaaaggaaatatcttcccataaaaactagacagaagcattctcagaaacttgttcttgatgtgtcccctctactgacagagttgaacctttctttgcaaagagcagctttgaaacactctttttgtagaatctgcaagaagatatttggatagctttgaggatttcgttggaaacgggtatgtcttcagataaactctagacagaagcattctcagaaacttctttgggatgttgcattcaagtcacagagtagaacattcccattcatagagcagatttgaaacactctttttgtagtatctggaagtggacatttggagctgctttcaggcctatgttgaaaaaggaaatatcttcccataaaaactagacggaagcattctcagaaacttacttgtgatgtgtttgctcaactaacagaattgaaccatcgttttgaaggagcagttttgaaacactgttttcgttgaatctgcaagtggatatttggctagctttgaggatttcgttggaaacgggattacatataaaaaggagacagcagcattctcagaaacttctttgtgatgtctgcattcaagtcacagagttgagcattccctttcatagagcaggttggaaacactctttttgtagtatctggatgaggacatttggagcgctttcaggcgtatggtgaaaaaggaaatatcttcccgtaaaaactagacagaagcattctcagaaatttatttgtgatgtgtgccctcaactaacagagttgaacctttcttttgatagagcagttttgaaacactctttttgtaaaatctgcaagaggatatttggatagctttgaggatttcgttgcaaacgggaatggcttcatataaactctagacagaagcattctcagaaacttcgttgggatgtttcgattgaagtcccagtgttgaacattcccttttatagagcaggttggaaacactctttctgcattccctggaagtggacatttggagcgctttcaggacgacggtgaaaatggaaatatcttccaagaaaatctagatagaagcaatgtcagaaacttttatgtgatggatctactcagctaacagagttgaacctttcttttgagagagcagttttgcaacactctttttgtggaatatgcaagtggatattagggcagctttgaggatttcgttggaaacgggaatacatgtaaaaagcagacagcagcattctcagaaacttctttgtgatgtttgcattgaagtcacagagttgaacattccctttgagagagcaggtttgaaacacgccttttgtcatatctggaagtgtccattcggagcgcattcaggcttgtgttgaaaaaggaaatatcctcccagaaaaactagacagaagcattctcagaaacttatctgtgatgtatgtactcaactaacagaactaaaccatcgttttgaaggagcagttttgaaacactctttttgcggaatctgcaagtggatatttggctagctgggaggatttcgttggaaacgggattacatacaaaaagcagacagcagcattctcagaaacttctttgtgatgtttgcattcaagtcacagagttgaacattccctttcatagagcaggtttgaaacactctttttgtagtatctggatgtggacatttggatcgctttcaggcctatggtgaaaaaggaaatatcttcccatgaaaactagacagaagcattctcagaaacttatttgtgatgtgtgccctcaactgacagtgttgaacctttgttttgatagagcagttctgaaacacactttttgtaaaatctgcaagaggatatttggatagctttgaggatttcgttggaaacgggaatgtcttcatgtaaactctacacagaagcattctcagaaactgctttgggatgtttcaattgaagtcccagtgttgaacattcccattcatagagcaggtttgaaacactctttttctactatctggaagtggacatttggagcgctttcaggtctacggtgaaaaaggagatatcttccaataaaaactagatagaagcaatgtcagaacttttttcatgatgtatctactcagcaaacagagttgaacctttcttttgagagagcagttttgaaacactctttttgtggaatatgcaagtgggtattaggccagcttggaggatttcgttggaaacgggaatacgtataaaaagcagacagcagcattgtcagaaactactttgtgatgtttgcattcaagtcacagaattgaacactccctttcacagagcaggtttgaaacactctttttgtagtgtctgtaagtgaacatttggattgctttcaggcctaaggtgaaaaaggaaatatcttcccataaaaactagacagaagcattctcagaaacttgtttgtgatgtgtgccctctactgacagagttgaacctttctttgcaaaggagcagttttgaaacactctttttgtagaatctgcaagaggatatttggatagctttgaggatttcttgggaaacgggaatgtcttcagataaactctagacagaagcattctcagaaacttctttgggatgtttcaattgaagtcacagtgttgaacattccctttcacagagcaggtttcaaacactctttttgtagtgtctataagtgaacatttggcgtgctttcaggcctaacgtgaaaaaggaaatatcttcccataaaaactagacagaagtattctcagaaacttgttcgtgatgtgtgccctctactgacagagttgaacctttctttgcaaagagcagctttgaaacacactttttgtagaatctgcaagaggatatttggatagctttgaggatttcgttggaaacgggtatgtcttcagataaactctagacagaagcattctcagaaacttctttgggatgttgcattcaagtcacagagtagaacattcccattcatagagcagatttgaaacactctttttgtagtatctggaagtggacatttggagcgctttcaggcctatgttgaaaaaggaaatatcttcccataaaaactagacggaagcattctcagaaacttaattgtgatgtgtttgctcaactaacaggattgaaccatcgttttgaaggagcagttttgaaacactgttttcgtggaatctgcaagtggatatttggctagctttgaggatttcgttggaaacgggattacatataaaaaggagacagcagcattctcagaaacttctttgtgatgtctgcattcaattcacagagttgagcattccctttcatagagcaggttggaaacactctttttgtagtatctggatgtggacatttggatcgctttcaggcctatggtgaaaaaggaaatatcttcccatgaaaactagacagaagcattctcagaaacttatttgtgatgtgtgcactcaactgacagtgttgaacctttgttttgatagagcagttctgaaacacactttttgtaaaatctgcaagaggatatttggatagctttgaggatttcgttggaaacgggaatgtcttcatgtaaactctagacagaagcattctcagaaactgctttgggatgtttcaattgaagtcccagtgttgaacattcccattcatagagcaggtttgaaacactctttttgtactatctggaagtggacatttggagcgctttcaggtctacggtgaaaaaggagatatcttccaataaaaactagatagaagcaatgtcagaacttttttcatgatgtatctactcagcaaacagagttgaacctttcttttgagagagcagttttgaaacactctttttgtggaatatgcaagtgggtattaggccagcttggaggatttcgttggaaacgggaatacgtataaaaagcagacagcagcattgtcagaaactactttgtgatgtttgcattcaagtcacagaattgaacactccctttcacagagcaggtttgaaacactctttttgtagtgtctgtaagtgaacatatggattgctttcaggcctaaggtgaaaaaggaaatatcttcccataaaaactagacagaagcattctcagaaacttgtttgtgatgtgtgccctctactgacagagttgaacctttctttgcaaagagcagttttgaaacactctttttgtagaatctgcaagaggatatttggatagctttgaagatttcttgggaaacgggaatgtcttcagataaactctagacagaagcattctcagaaacttctttgggatgtttcaattgaagtcacagtgttgaacattccctttcacagagcaggtttgaaacactctttttgtagtgtctataagtgaacatttggcgtgctttcagggcctaacgtgaaaaaggaaatatcttcccataaaaactagacagaagcattctcagaaacttgttcgtgatgtgtgccctctactgacagagttgaacctttctttgcaaagagcagctttgaaacacactttttgtagaatctgcaagaggatatttggatagcttggaggatttcgttggaaacgggtatgtcttcagataaactctagacagaagcattctcagaaacttctttgggatgttgcattcaagtcacagagtagaacattcccattcatagagcagatttgaaacactctttttgtagtatctggaagtggacatttggagcgctttcaggcctatgttgaaaaaggaaatatcttcccataaaaactagacggaagcattctcagaaacttatttgtgatgtgtttgctcaactaacaggattgaaccatcgttttgaaggagcagttttgaaacactgttttcgtggaatctgcaagtggatatttggctagctttgaggatttcgttggaaatgggattacatataaaaaggagacagcagcattctcagaaacttctttgtgatgtctgcattcaattcacagagttgagcattccctttcatagagcaggttggaaacactctttttgtagtatctggatgaggacatttggagcgctttcaggcgtatggtgaaaaaggaaatatcttcccgtaaaaactagacagaagcattctcagaagtttatttgtgatgtgtgccctcaactaacagagttgaacctttcttttgatagagcagttttgaaacactctttttgtaaaatctgcaagaggatatttggatagctttgaggatttcgttgcaaacgggaatggcttcatataaactctagacagaagcattctcagaaacttcgttgggatgtttcgattgaagtcccagtgttgaacattcccttttatagagcaggttggaaacactctttctgcattccctggaagtggacatttggagcgctttcaggacgacggtgaaaatggaaatatcttccaagaaaatctagatagaagcaatgtcagaaacttttctgtgatggatctactcagctaacagagttgaacctttcttttgagagagcagttttgcaacactctttttgtggaatatgcaagtggatattagggcagctttgaggatttcgttggaaacgggaatacatgtaaaaagcagacagcagcattctcagaaacttctttgtgatgtttgcattgaagtcacagagttgaacattccctttgagagagcaggtttgaaacacgccttttgtcatatctggaagtgtccattcggagcgcattcaggcttgtgttgaaaaaggaaatatcctcccataaaaactagacagaagcattctcagaaacttatctgtgatgtatgtactcaactaacagaactaaaccatcgttttgaaggagcagttttgaaacactctttttgcggaatctgcaagtggatatttggctagctgggaggatttcgttggaaacgggattacatacaaaaagcagacagcagcattctcagaaacttctttgtgatgtttgcattcaagtcacagagttgaacattccctttcatagagcaggtttgaaacactctttttgtagtatctggatgtggacatttggatcgctttcaggcctatggtgaaaaaggaaatatcttcccatgaaaactagacagaagcattctcagaaacttatttgtgatgtgtgccctcaactgacagtgtggaacctttgttttgatagagcagttctgaaacacactttttgtaaaatctgcaagaggatatttggatagctttgaggatttcgttggaaacgggaatgtcttcatgtaaactctacacagaagcattctcagaaactgctttgggatgtttcaattgaagtcccagtgttgaacattcccattcatagagcaggtttgaaacactctttttgtaatatctggaagtggacattttgagcgctttcaggtctacggtgaaaaaggagatatcttccaataaaaactagatagaagcaatgtcagaacttttttcatgatgtatctactcagctaacagagttgaacctttcttttgagagagcagttttgaaacactctttttgtggaatatgcaagtgggtattaggccagcttggaggatttcgttggaaacgggaatacgtataaaaagcagacagcagcattgtcagaaactactttgtgatgtttgcattcaagtcacagaattgaacactccctttcacagagcaggtttgaaacactctttttgtagtgtctgtaagtgaacatatggattgctttcaggcctaaggtgaaaaaggaaatatcttcccataaaaactagacagaagcattctcagaaacttgtttgtgatgtgtgccctctactgacagagttgaacctttctttgcaaagagcagttttgaaacactctttttgtagaatctgcaagaggatatttggatagctttgaagatttcttgggaaacgggaatgtcttcagataaactctagacagaagcattctcagaaacttctttgggatgtttcaattgaagtcacagtgttgaacattccctttcacagagcaggtttgaaacactctttttgtagtgtctataagtgaacatttggcgtgctttcaggcgtaacgtgaaaaaggaaatatcttcccataaaaaccagacagaagcattctcagaaacttgttcgtgatgtgtgccctctactgacagagttgaacctttctttgcaaagagcagctttgaaacactctttttgtagaatctgccagaggatatttggatagctttgaggatttcgttggaaacgggtatgtcttcagataaactctagacagaagcattctcagaaacttctttgggatgttgcattcaagtcacagagtagaacattcccattcatagagcagatttgaaacactctttttgtagtatctggaagtggacatttggagcgctttcaggcctatgttgaaaaaggaaatatcttcccataaaaactagacggaagcattctcagaaacttacttgtgatgtgtttgctcaactaacagaattgaaacatcgttttgaaggagcagttttgaaacactgttttcgtggaatctgcaagtggatatttggctagctttgaggatttcgttggaaacgggattacatataaaaaggagacagcagcattctcagaaacttctttgtgatgtttgcattcaagtcacagagttgaacattccctttcatagagcaggtttgaaacactctttttgtagtatctggatgtggacatttggatcgctttcaggcctatggtgaaaaaggaaatatcttcccatgaaaactagacagaagcattctcagaaacttatttgtgatgtgtgccctcaactgacagtgttgaacctttgttttgatagagcagttctgaaacacactttttgtaaaatctgcaagaggatatttggatagctttgaggatttcgttggaaacgggaatgtcttcatgtaaactctagacagaagcattctcagaaactgctttgggatgtttcaattgaagtcccagtgttgaacattccctttcatagagcaggtttgaaacactctttttgtactatctggaagtggacatttggagcgctttcaggtctacggtgaaaaaggagatatcttccaataaaaactagatagaagcaatgtcagaacttttttcatgatgtatctactcagcaaacagagttgaacctttcttttgagagagcagtttcgaaacactctttctgtggaatatgcaagtgggtattaggccagcttggaggatttcgttggaaacgggaatacgtataaaaagcagacagcagcattgtcagaaactactttgtgatgtttgcattcaagtcacagaattgaacactccctttcacagagcaggtttgaaacactctttttgtagtgtctgtaagtgaacatttggattgctttcaggcctaaggtgaaaaaggaaatatcttcccataaaaactagacagaagcattctcagaaacttgtttgtgatgtgtgccctctactgacagagttgaacctttctttgcaaagagcagttttgaaacactctttttgtagaatctgcaagaggatatttggatagctttgaggatttcttgggaaacgggaatgtcttcagataaactctagacagaagcattctcagaaacttctttgggatgtttcaattgaagtcacagtgttgaacattccctttcacagagcaggtttgaaacactctttttgtagtgtgtataagtgaacatttggcgtgctttcaggcctaacgtgaaaaaggaaatatcttcccataaaaactagacagaagcattctcagaaacttgttcatgatgtgtgccctctactgacagagttgaacctttctttgcaaagagcagctttgaaacactctttttgtagaatctgcaagaggatatttggatagcttggaggatttcgttggaaacgggtatgtcttcagataaactctagacagaagcattctcagaaacttctttgggatgtttcaattgaagtcacagtgttgaacattccctttcacagagcaggtttgaaacactctttttgtagtgtctataagtgaacatttggcgtgctttcaggcctaatgtgaaaaaggaaatatcttcccataaaaactagacagaagcattctcagaaacttacttgtgatgtgtttgctcaactaacagaattgaaccatcgttttaaaggagcagttttgaaacactgttttcgtggaatctgcaagtggatatttggctagctttgaggatttcgttggaaacgggattacatataaaaaggagacagcagcattctcagaaacttctttgtgatgtctgcattcaagtcacagagttgagcattccctttcatagagcaggttggaaacactctttttgtagtatctggatgaggacatttggagcgctttcaggcgtatggtgaaaaaggaaatatcttcccgtaaaaactagacagaagcattctcagaaatttatttgtgatgtgtgccctcaactaacagagttgaacctttcttttgatagagcagttttgaaacactctttttgtaaaatctgcaagaggatatttggatagctttgaggatttcattgcaaacgggaatggcttcatataaactctagacagaagcattctcagaaacttcgttgggatgtttcgattgaagtcccagtgttgaacattcccttttatagagcaggttggaaacactctttctgcattccctggaagtggacatttggagcgctttcaggacgacggtgaaaatggaaatatcttccaagaaaatctagatagaagcaacgtcagaaacttttatgtgatggatctactcagctaacagagttgaacctttcttttgagagagcagttttgcaacacactttttgtggaatatgcaagtggatattagggcagctttgaggatttcgttggaaacgggaatacatgtaaaaagcagacagcagcattctcagaaacttctttgtgatgtttgcattgaagtcacagagttgaacattccctttgagagagcaggtttgaaacacgccttttgtcgtatctggaagtgtccattcggagcgcattcaggcttgtgttgaaaaaggaaatatcctcccataaaaactagacagaagcattctcagaaacttatctgtgatgtatgtactcaactaacagaactaaaccatcgttttgaaggagcagttttgaaacactctttttgcggaatctgcaagtggatatttggctagctgggaggatttcgttggaaacgggattacatacaaaaagcagacagcagcattctcagaaacttctttgtgatgtttgcattcaagtcacagagttgaacattccctttcatagagcaggttggaaacactctttttgtagtatctggatgtggacatttggatcgctttcaggcctatggtgaaaaaggaaatatcttcccatgaaaactagacagaagcattctcagaaacttatttgtgatgtgtgccctcaactgacagtgttgaacctttgttttgatagagcagttctgaaacacactttttgtaaaatctgcaagaggatatttggatagctttgaggatttcgttggaaacgggaatgtcttcatgtaaactctggacagaagcattctcagaaactgctttgggatgtttcaattgaagtcccagtgttgaacattccctttcatagagcaggtttgaaacactctttttgtactatctggaagtggacatttggagcgctttcaggtctacggtgaaaaaggagatatcttccaataaaaactagatagaagcaatgtcagaacttttttcatgatgtatctactcagcaaacagagttgaacctttcttttgagagagcagttttgaaacactctttttgtggaatatgcaagtgggtattaggccagcttggaggatttcgttggaaacgggaatacgtataaaaagcagacagcagcattgtcagaaactactttgtgatgtttgcattcaagtcacagaattgaacactccctttcacagagcaggtttgaaacactctttttgtagtgtctgtaagtgaacatttggattgctttcaggcctaaggtgaaaaaggaaatatcttcccataaaaactagacagaagcattctcagaaacttgtttgtgatgtgtgccctctactgacagagttgaacctttctttgcaaagagaagttttgaaacactctttttgtagaatctgcaagaggatatttggatagctttgaggatttcttgggaaacgggaatgtcttcagataaactctagacagaagcattctcagaaacttctttgggatgtttcaattgaagtcacagtgttgaacattccctttcacagagcaggtttgaaacactctttttgtagtgtctataagtgaacatttggcgtgctttcagttgtaacgtgaaaaaggaaatatcttcccataaaaactagacagaagcattctcagaaacttgttcttgatgtgtcccctctactgacagagttgaacctttctttgcaaagagcagctttgaaacactctttttgtagaatctgcaagaggatatttggatagcttggaggatttcgttggaaacgggtatgtcttcagataaactctagacagaagcattctcagaaacttctttgggatgttgcattcaagtcacagagtagaacattcccattcatagagcagatttgaaacactctttttgtagtatctggaagtggacatttggagcgctttcaggcctatgttgaaaaaggaaatatcttcccataaaaactagacggaagcattctcagaaacttatttgtgatgtgtttgctcaactaacaggattgaaccatcgttttgaaggagcagttttgaaacactgttttcgtggaatctgcaagtggatatttggctagctttgaggatttcgttggaaacgggattacatatacaaaggagacagcagcattcccagaaacttctttgtgatgtctgcattcaattcacagagttgagcattccctttcatagagcaggttggaaacactctttttgtagtatctggatgaggacatttggagcgctttcaggcctatggtgaaaaaggaaatatcttcccgtaaaaactagacagaagcattctcagaagtatatttgtgatgtgtgccctcaactaacagagttgaacctttcttttgatagagcagttttgaaacactctttttgtaaaatctgcaagaggatatttggatagctttgaggatttcgttgcaaacgggaatggcttcatataaactctaaacagaagcattctcagaaacttcgttgggatgtttcgattgaagtcccagtgttgaacattcccttttatagagcaggttggaaacactctttctgcattccctggaagtggacatttggagcgctttcaggacgacggtgaaaatggaaatatcttccaagaaaatctagatagaagcaatgtcagaaacttttatgtgatggatctactcagctaacagagttgaacctttcttttgagagagcagttttgcaacactctttttgtggaatatgcaagtggatattagggcagctttgaggatttcgttggaaacgggaatacatgtaaaaagcagacagcagcattctcagaaacttctttgtgatgtttgcattgaagtcacagagttgaacattccctttgagagagcaggtttgaaacacgccttttgtcatatctggaagtgtccattcggagcacattcaggcttgtgttgaaaaaggaaatatcctcccataaaaactagacagaagcattctcagaaacttatctgtgatgtatgtactcaactaacagaactaaaccatcgttttgaaggagcagttttgaaacactctttttgcggaatctgcaagtggatatttggctagctgggaggatttcgttggaaacgggattacatacaaaaagcagacagcagcattctcagaaacttctttgtgatgtttgcattcaagtcacagagttgaacattccctttcatagagcaggtttgaaacactctttttgtagtatctggatgtggacatttggatcgctttcaggcctatggtgaaaaaggaaatatcttcccatgaaaactagacagaagcattctcagaaacttatttgtgatgtgtgccctcaactgacagtgttgaacctttgttttgatagagcagttctgaaacacactttttgtaaaatctgcaagaggatatttggatagctttgaggatttcgttggaaacgggaatgtcttcatgtaaactctacacagaagcattctcagaaactgctttgggatgtttcaattgaagtcccagtgttgaacattcccattcatagagcaggtttgaagcactctttttgtactatctggaagtggacatttggagcgctttcaggtctacggtgaaaaaggagatatcttccaataaaaactagatagaagcaatgtcagaacttttttcatgatgtatctactcagcaaacagagttgaacctttcttttgagagagcagttttgaaacactctttttgtggaatatgaaagtgggtattaggccagcttggaggatttcgttggaaacgggaataccgtataaaaagcagacagcagcattgtcagaaactactttgtgatgtttgcattcaagtcacagaactgaacactccctttcacagagcaggtttgaaacactctttttgtagtgtctgtaagtgaacatttggattgctttcaggcctaaggtgaaaaaggaaatatcttcccataaaaactagacagaagcattctcagaaacttgtttgtgatgtgtgccctctactgacagagttgaacctttctttgcaaagagcagttttgaaacactctttttgtagaatctgcaagaggatatttggatagctttgaggatttcttgggaaacgggaatgtcttcagataaactctagacagaagcattctcagaaacttctttgggatgtttcaattgaagtcacagtgttgaacattccctttcacagagcaggtttgaaacactctttttgtagtgtctataattgaacatttggcgtgctttcaggcctaacgtgaaaaaggaaatatcttcccataaaaactagacagaagcattctcagaaacttgttcgtgatgtgtgccctctactgacagagttgaacctttctttgcaaagagcagctttgaaacactctttttgtagaatctgcaagaggatatgtggatagctttgaggatttcgttggaaacgggtatgtcttcagataaactctagacggaagcattctcagaaacttctttgggatgtttcaattgaagtcacagtgttgaacattccctttcacagagcaggtttgaaacactctttttgtagtgtctataagtgaacatttggcgtgctttcaggcctaacgtgaaaaaggaaatatcttcccataaaaactagacagaagcattctcagaaacttgttcgtgatgtgtgacctctacagacagagttgaacctttctttgcaaagagcagctttgaaacacactttttgtagaatctgcaagaggatatttggatagctttgaggatttcgttggaaacgggtatgtcttcagataaactctagacagaagcattctcagaaacttctttgggatgttgcattcaagtcacagagtagaacattcccattcatagagcagatttgaaacactctttttgtagtatctggaaatggacatttggagcgctttcaggcctatgttgaaaaaggaaatatcttcccataaaaactagacggaagcattctcagaaacttatttgtgatgtgtttgctcaactaacaggattgaaccatcgttttgaaggagcagttttgaaacactgttttcgtggaatctgcaagtggatatttggctagctttgaggatttcgttggaaacgggattacatatacaaaggagacagcagcattctcagaaacttctttgtgatgtctgcattcaattcacagagttgagcattccctttcatagagcaggttggaaacactctttttgtagtatctggatgaggacatttggagcgctttcaggcgtatggtgaaaaaggaaatatcttcccgtaaaaactagacagaagcattctcagaagtttatttgtgatgtgtgccctcaactaacagagttgaacctttcttttgatagagcagttttgaaacactctttttgtaaaatctgcaagaggatatttggatagctttgaggatttcgttgcaaacgggaatggcttcatataaactcctagacagaagcattctcagaaacttcgttgggatgtttcgattgaagtcccagtgttgaacattcccttttatagagcaggttggaaacactctttctgcattccctggaagtggacatttggagcgctttcaggacgacggtgaaaatggaaatatcttccaagaaaatctagatagaagcaacgtcagaaacttttctgtgatggatctactcagctaacagagttgaacctttcttttgagagagcagttttgcaacactctttttgtggaatatgcaagtggatattagggcagctttgaggatttcgttggaaacgggaatacatgtaaaaagcagacagcagcattctcagaaacttctttgtgatgtttgcattgaagtcacagagttgaacattccctttgagagagcaggtttgaaacacgccttttgtcatatctggaagtgtccattcggagcgcattcaggcttgtgttgaaaaaggaaatatcctcccataaaaactagacagaagcattctcagaaacttatctgtgatgtatgtactcaactaacagaactaaaccatcgttttgaaggagcagttttgaaacactctttttgcggaatctgcaagtggatatttggctagctgggaggatttcgttggaaacgggattacatacaaaaagcagagagcagcattctcagaaacttctttgtgatgtttgcattcaagtcacagagttgaacattccctttcatagagcaggtttgaaacactctttttgtagtatctggatgtggacatttggatcgctttcaggcctatggtgaaaaaggaaatatcttcccatgaaaactagacagaagcattctcagaaacttatttgtgatgtgtgccctcaactgacagtgttgaacatttgttttgatagagcagttctgaaacacactttttgtaaaatctgcaagaggatatttggatagctttgaggatttcgttggaaacgggaatgtcttcatgtaaactctagacagaagcattctcagaaactgctttgggatgtttcaattgaagtcccagtgttgaacattcccattcatagagcaggtttgaaacactctttttgtactatctggaagtggacatttggagcgctttcaggtctacggtgaaaaaggagatatcttccaataaaaactagatagaagcaatgtcagaacttttttcatgatgtatctactcagcaaacagagttgaacctttcttttgagagagcagttttgaaacactctttttgtggaatatgcaagtgggtattaggccagcttggaggatttcgttggaaacgggaatacgtataaaaagcagacagcagcattgtcagaaactactttgtgatgtttgcattcaagtcacagaattgaacactccctttcacagagcaggtttgaaacactctttttgtagtgtctataagtgaacatttggcgtgctttcaggcctaacgtgaaaaaggaaatatcttcccataaaaactagacagaagcattctcagaaacttgttcgtgatgtgtgccctctactgacagagttgaacctttctttgcaaagagcagctttgaaacacactttttgtagaatctgcaagaggatatttggatagcttggaggatttcgttggaaacgggtatgtcttcagataaactctagacagaagcattctcagaaacttctttgggatgttgcatgcaagtcacagagtagaacattcccattcatagagcagatttgaaacactctttttgtagtatctggaagtggacatttggagcgctttcaggcctatgttgaaaaaggaaatatcttcccataaaaactagacggaagcattctcagaaacttatttgtgatgtgtttgctcaactaacaggattgaaccatcgttttgaaggagcagttttgaaacactgttttcgtggaatctgcaagtggatatttggctagctgggaggatttcgttggaaacgggattacatataaaaaggagacagcagcattctcagaaacttctttgtgatgtctgcattcaattcacagagttgagcattccctttcatagagcaggttggaaacactctttttgtagtatctggatgtggacatttggatcgctttcaggcctatggtgaaaaaggatatatcttcccatgaaaactagacagaagcattctcagaaacttatttgtgatgtgtgccctcaactgacagtgttgaacctttgttttgatagagcagttctgaaacacactttttgtaaaatctgcaagaggatatttggatagctttgaggatttcgttggaaacgggaatgtcttcatgtaaactctagacagaagcattctcagaaactgctttgggatgtttcaattgaagtcccagtgttgaacattcccattcatagagcaggtttgaaacactctttttgtactatctggaagtggacatttggagcgctttcaggtctacggtgaaaaaggagatatcttccaataaaaactagatagaagcaatgtcagaacttttttcatgatgtatctactcagcaaacagagttgaacctttcttttgagggagcagttttgaaacactatttttgtggaatatgcaagtgggtattaggccagcttggaggatttcgttggaaacgggaatacgtataaaaagcagacagcagcattgtcagaaactactttgtgatgtttgcatgcaagtcacagaactgaacactccctttcacagagcaggtttgaaacactctttttgtagtgtctgtaagtgaacatttggattgctttcaggcctaaggtgaaaaaggaaatatcttcccataaaaactagacagaagcattctcagaaacttgtttgtgatgtgtgccctctactgacagagttgaacctttctttgcaaagagcagttttgaaacactctttttgtagaatctgcaagaggatatttggatagctttgaggatttcttgggaaacgggaatgtcttcagataaactctagacagaagcattctcagaaacttctttgggatgtttcaattgaagtcacagtgttgaacattccctttcacagagcaggtttgaaacactctttttgtagtgtctataagtgaacatttggcgtgctttcaggcgtaacgtgaaaaaggaaatatcttcccataaaaactagacagaagcattctcagaaacttgttcgtgatgtgtgccctctactgacagagttgaacctttctttgcaaagagcagctttgaaacacactttttgtagaatctgcaagaggatatttggatagcttggaggatttcgttggaaacgggtatgtcttcagataaactctagacagaagcattctcagaaacatctttgggatgttgcattcaagtcacagagtagaacattcccattcatagagcagatttgaaacactctttttgtagtatctggaagtggacatttggagcgctttcaggcctatgttgaaaaaggaaatatcttcccataaaaactagacggaagcattctctgaaacttatttgtgatgtgtttgctcaactaacaggattgaaccatcgttttgaaggagcagttttgaaacactgttttcgtggaatctgcaagtggatatttggctagctttgaggatttcgttggaaacgggattacatataaaaaggagacagcagcattctcagaaacttctttgtgatgtctgcattcaattcacagagttgagcattccctttcatagagcaggttggaaacactctttttgtagtatctggatgaggacatttggagcgctttcaggcgtatggtgaaaaaggaaatatcttcccgtaaaaactagacagaagcattctcagaagtttatttgtgatgtgtgccctcaactaacagagttgaacctttcttttgatagagcagttttgaaacactctttttgtaaaatctgcaagaggatatttggatagctttgaggatttcgttgcaaacgggaatggcttcatataaactctagacagaagcattctcagaaacttcgttgggatgtttcgattgaagtcccagtgttgaacattcccttttatagagcaggttggaaacactctttctgcattccctggaagtggacatttggagcgctttcaggacgacggtgaaaatggaaatatcttccaagaaaatctagatagaagcaacgtcagaaacttttctgtgatggatctactcagctaacagagttgaacctttcttttgagagagcagttttgcaacactctttttgtggaatatgcaagtggatattagggcagctttgaggatttcgttggaaacgggaatacatgtaaaaagcagacagcagcattctcagaaacttctttgtgatgtttgcattgaagtcacagagttgaacattccctttgagagagcaggtttgaaacacgccttttgtcatatctggaagtgtccattcggagcgcattcaggcttgtgttgaaaaaggaaatatcctcccataaaaactagacagaagcattctcagaaacttatctgtgatgtatgtactcaactaacagaactaaaccaccgttttgaagggcagttttgaaacactctttttgcggaatctgcaagtggatatttggctagctgggaggatatcgttggaaacgggattacatacaaaaagcagacagcagcattctcagaaacttctttgtgatgtttgcattcaagtcacagagttgaacattccctttcatagagcaggtttgaaacactctttttgtagtatctggatgtggacatttggatcgctttcaggcctatggtgaaaaaggaaatatcttcccatgaaaactagacagaagcattctcagaaacttatttgtgatgtgtgccctcaactgacagtattgaacctttgttttgatagagcagttctgaaacacactttttgtaaaatctgcaagaggatatttggatagctttgaggatttcgttggaaacgggaatgtcttcatgtaaactctagacagaagcattctcagaaactgctttgggatgtttcaattgaagtcccagtgttgaacattccctttcatagagcaggtttgaaacactctttttgtactatctggaagtggacatttggagcgctttcaggtctacggtgaaaaaggagatatcttccaataaaaactagatagaagcaatgtcagaacttttttcatgatgtatctactcagcaaacagagttgaacctttcttttgagagagcagttttgaaacactctttttgtggaatatgcaagtgggtattaggccaccttggaggatttcgttggaaacgggaatacgtataaaaagcagacagcagcattgtcagaaactactttgtgatgtttgcattcaagtcacagaattgaacactccctttcacagagcaggtttgaaacactctttttgtagtgtctgtaagtgaacatttggattgctttcaggcctaaggtgaaaaaggaaatatcttcccataaaaactagacagaagcattctcagaaacttgtttgtgatgtgtgccctctactgacagagttgaacctttctttgcaaagagcagttttgaaacactctttttgtagaatctgcaagaggatatttggatagctttgaggatttcttgggaaacgggaatgtcttcagataaactctagacagaagcattctcagaaacttctttgggatgtttcaattgaagtcacagtgttgaacattccctttcacagagcaggtttgaaacactctttttgtagtgtctataagtgaacatttggcgtgctttcaggcgtaacgtgaaaaaggaaatatcttcccataaaaactagacagaagcattctcagaaacttgttcttgatgtgtcccctctactgacagagttgaacctttctttgcaaagagcagctttgaaacactctttttgtagaatctgcaagaggatatttggatagctttgaggatttcgttggaaacgggtatgacttcagataaactctagacagaagcattctcagaaacttctttgggatgttgcattcaagtcacagagtagaacattcccattcatagagcagatttgaaacactctttttgtagtatctggaagtggacatttggagcgctttcaggcctatgttgaaaaaggaaatatcttcccataaaaactagacggaagcattctcagaaacttatttgtgatgtgtttgctcaactaacaggattgaaccatcgttttgaaggagcagttttgaaacactgttttcgtggaatctgcaagtggatatttggctagctttgaggatttcgttggaaacgggattacatataaaaaggagacagcagcattctcagaaacttctttgtgatgtctgcattcaattcacagagttgagcattccctttcatagagcaggttggaaacactctttttgtagtatctggatgaggacatttggagcgctttcaggcgtatggtgaaaaaggaaatatcttcccgtaaaaactagacagaagcattctcagaaatttatttgtgatgtgtgccctcaactaacagagttgaacctttcttttgatagagcagttttgaaacactctttttgtaaaatctgcaagaggatatttggatagctttgaggatttcgttgcaaacgggaatggcttcatataaactctagacagaagcattctcagaaacttcgttgggatgtttcgattgaagtcccagtgttgaacattcccttttatagagcaggttggaaacactctttctgcattccctggaagtggacatttggagcgctttcaggacgacggtgaaaatggaaatatcttccaagaaaatctagatagaagcaacgtcagaaacttttctgtgatggatctactcagctaacagagttgaacctttcttttgagagagcagttttgcaacactctttttgtggaatatgcaagtggatattagggcagctttgaggatttcgttggaaacgggaatacatgtaaaaagcagacagcagcattctcagaaacttctttgtgatgtttgcattgaagtcacagagttgaacattccctttgagagagcaggtttgaaacacgccttttgtcatatctggaagtgtccattcggagcgcattcaggcttgtgttgaaaaaggaaatatcctcccataaaaactagacagaagcattctcagaaacttatctgtgatgtatgtactcaactaacagaactaaaccatcgttttgaaggagcagttttgaaacactctttttgcggaatctgcaagtggatatttggctagctgggaggatttcgttggaaacgggattacatacaaaaagcagacagcagcattctcagaaacttctttgtgatgtttgcattcaagtcgcagagttgaacattccctttcatagagcaggtttgaaacactctttttgtagtatctggatgtggacatttggatcgctttcaggcctatggtgaaaaaggaaatatcttcccatgaaaactagacagaagcattctcagaaacttatttgtgatgtgtgccctcaactgacagtgttgaacctttgttttgatagagcagttctgaaacacactttttgtaaaatctgcaagaggatatttggatagctttgaggatttcgttggaaacgggaatgtcttcatgtaaactctagacagaagcattctcagaaactgctttgggatgtttcaattgaagtcccagtgttgaacattccctttcatagagcaggtttgaaacactctttttgtactatctggaagtggacatttggagcgctttcaggtctacggtgaaaaaggagatatcttccaataaaaactagatagaagcaatgtcagaacttttttcatgatgtatctactcagcaaacagagttgaacctttcttttgagagagcagttttgaaacactctttttgtggaatatgcaagtgggtattaggccagcttggaggatttcgttggaaacgggaatacgtataaaaagcagacagcagcattgtcagaaactactttgtgatgtttgcattcaagtcacagaattgaacactccctttcacagagcaggtttgaaacactctttttgtagtgtctgtaagtgaacatttggattgctttcaggcctaaggtgaaaaaggaaatatcttcccataaaaactagacagaagcattctcagaaacttgtttgtgatgtgtgccctctactgacagagttgaacctttctttgcaaagagcagttttgaaacactctttttgtagaatctgcaagaggatatttggatagctttgaggatttcttgggaaacgggaatgtcttcagataaactctagacagaagcattctcagaaactcctttgggatgtttcaattgaagtcacagtgttgaacattccctttcacagagcaggtttgaaacactctttttgtagtgtctataagtgaacatttggcgtgctttcaggcctaacgtgaaaaaggaaatatcttcccataaaaactagacagaagcattctcagaaacttgttcttgatgtgtcccctctactgacagagttgaacctttctttgcaaagagcagctttgaaacactctttttgtagaatctgcaagaggatatttggatagcttggaggatttcgttggaaacgggtatgtcttcagataaactctagacagaagcattctcagaaacttctttgggatgttgcattcaagtcacagagtagaacattcccattcatagagcagatttgaaacactctttttgtagtatctggaagtggacatttggagcgctttcaggcctatgttgaaaaaggaaatatcttcccataaaaactagacggaagcattctcagaaacttaattgtgatgtgtttgctcaactaacaggattgaaccatcgttttgaaggagcagttttgaaacactgttttcgtggaatctgcaagtggatatttggctagctttgaggatttcgttggaaacgggattacatataaaaaggagacagcagcattctcagaaacttctttgtgatgtctgcattcaattcacagagttgagcattccctttcatagagcaggttggaaacactctttttgtagtatctggatgaggacatttggatcgctttcaggcctatggtgaaaaaggaaatatcttcccatgaaaactagacagaagcattctcagaaacttatttgtgatgtgtgcactcaactgacagtgttgaacctttgttttgatagagcagttctgaaacacactttttgtaaaatctgcaagaggatatttggatagctttgaggatttcgttggaaacgggaatgtcttcatgtaaactctagacagaagcattctcagaaactgctttgggatgtttcaattgaagtcccagtgttgaacattcccattcatagagcaggtttgaaacactctttttctactatctggaagtggacatttggagcgctttcaggtctacggtgaaaaaggagatatcttccaataaaaactagatagaagcaatgtcagaacttttttcatgatgtatctactcagcaaacagagttgaacatttcttttgagagagcagttttgacacagtctttgtggaatatgcaagtgggtattaggccagcttggaggatttcgttggaaacgggaatacgtataaaaagcagacagcagcattgtcagaaactactttgtgatgtttgcattcaagtcacagaattgaacactccctttcacagagcaggtttgaaacactctttttgtagtgtctgtaagtgaacatttggattgctttcaggcctatggtgaaaaaggaaatatcttcccataaaaactagacagaagcattctcagaaacttgtttgtgatgtgtgccctctactgacagagttgaacctttctttgcaaagagcagttttgaaacactctttttgtagaatctgcaagaggatatttggatagctttgaggatttcttgggaaacgggaatgtcttcagataaactctagacagaagcattctcagaaacttctttgggatgtttcaattgaagtcacagtgttgaacattccctttcacagagcaggtttgaaacactctttttgtagtgtctataattgaacatttggcgtgctttcaggcctaacgtgaaaaaggaaatatcttcccatacaaaactagacagaagcattctcagaaacttgtttgtgatgtgtgccctctactgacagagttgaacctttctttgcaaagagcagctttgaaacactctgtttgtagaatctgcaagaggatatttggatagctttgaggatttcgttggaaacgggtatgtcttcacataaactctagacagaagcattctcagaaacttctttgggatgttgcattcaagttacagagtagaacattcccattcatagagcagatttgaaacactctttttgtagtatctggaagtggacatttggagcgctttcaggcctatgttgagaaacgaaatatcttcccataaaaactagacggaagcattctcagaaacttatttctgatgtgtttgctcaactaacagaattgaaccatcgttttgaaggagcagttttgaaaccctgttttcgtggaatctgcaagtggatatttggctagctttgaggatttcgttggaaacgggattacctataaaaaggagacagcagcattctcagaaacttctttgtgatgtctgcattcaagtcacagagttgagcattccctttcatagagcaggtttgaaacactctttttgtagtatctggatgaggacatttggagcgctttcaggcgtatggtgaaaaaggaaatatcttcccgtaaaaactagacagaagcattctcagaaatttatttgtgatgtgtgccctcaactaacagagttgaacctttcttttgatagagcagttttgaaacactctttttgtaaaatctgcaagaggatatttggatagctttgaggatttcattgcaaacgggaatggcttcatataaactctagacagaagcattctcagaaacttcgttgggatgtttcgattgaagtcccagtgttgaacattcccttttatagagcaggttggaaacactctttctgcattccctggaagtggacatttggagcgctttcaggacgacggtgaaaatggaaatatcttccaagaaaatctagatagaagcaacgtcagaaacttttctgtgatggatctactcagctaacagagttgaacctttcttttgagagagcagttttgcaacactctttttgtggaatatgcaagtggatattagggcagctttgaggatttcgttggaaacgggaatacatgtaaaaagcagacagcagcattctcagaaacttctttgtgatgtttgcattgaagtcacagcagttgaacattccctttgagagagcaggtttgaaacacgccttttgtcatatctggaagtgtccattcggagcgcattcaggcttgtgttgaaaaaggaaatatcctcccataaaaactagacagaagcattctcagaaacttatctgtgatgtatgtactcaactaacagaactaaaccatcgttttgaaggagcagttttgaaacactctttttgcggaatctgcaagtggatatttggctagctgggaggatttcgttggaaacgggattacatacaaaaagcagacagcagcattctcagaaacttctttgtgatgttagcattcaagtcacagagttgaacattccctttcatagagcaggtttgaaacactctttttgtagtatctggatgtggacatttggatcgctttcaggcctatggtgaaaaaggaaatatcttcccatgaaaactagacagaagcattctcagaaatttatttgtgatgtgtgccctcaactaacagagttgaacctttcttttgatagagcagttttgaaacactctttttgtaaaatctgcaagaggatatttggatagctttgaggatttcgttgcaaacgggaatggcttcatataaactctagacagaagcattctcagaaacttcgttgggatgtttcgattgaagtcccagtgttgaacattcccttttatagagcaggttggaaacactctttctgcattccctggaagtggacatttggagcgctttcaggacgacggtgaaaatggaaatatcttccaagaaaatctagatagaagcaacgtcagaaacttttatgtgatggatctactcagctaacagagttgaacctttcttttgagagagcagttttgcaacactctttttgtggaatatgcaagtggatattagggcagctttgaggatttcgttggaaacgggaatacatgtaaaaagcagacagcagcattctcagaaacttctttgtgatgtttgcattgaagtcacagagttgaacattccctttgagagagcaggtttgaaacacgccttttgtcatatctggaagtgtccattcggagcgcattcaggcttgtgttgaaaaaggaaatatcctcccataaaaactagacagaagcattctcagaaacttatttgtgatgtatgtactcaagtaacagaactaaaccatcgttttgaaggagcagttttgaaacactctttttgcggaatctgcaagtggatatttggctagctgggaggatttcgttggaaacgggattacatacaaaaagcagacagcagcattctcagaaacttctttgtgatgtttgcattcaagtcacagagttgaacattccctttcatagagcaggtttgaaacactctttttgtagtatctggatgtggacatttggatcgctttcaggcctatggtgaaaaaggaaatatcttcccatgaaaactagacagaagcattctcagaaacttatttgtgatgtgtgccctcaactgacagtgttgaacctttgttttgatagagcagttctgaaacacactttttgtaaaatctgcaagaggatatttggatagctttgaggatttcgttggaaacgggaatgtcttcatgtaaactctagacagaagcattctcagaaactgctttgggatgtttcaattgaagtcccagtgttgaacattccctttcatagagcaggtttgaaacactctttttgtactatctggaagtggacatttggagcgctttcaggtctacggtgaacaaggagatatcttccaataaaaactagatagaagcaatgtcagaacttttttcatgatgtatctactcagcaaacagtagttgaacctttcttttgagagagcagttttgaaacactctttttgtggaatatgcaagtgggtattaggccagcttggaggatttcgttggaaacgggaatacgtataaaaagcagacagcagcattgtcaggaaactactttgtgatgtttgcattcaagtcacagaattgaacactccctttcacagagcaggtttgaaacactctttttgtagtgtctgtaagtgaacatatggattgctttcaggcctaaggtgaaaaaggaaatatcttcccataaaaactagacagaagcattctcagaaacttgtttgtgatgtgtgccctctactgacagagttgaacctttctttgcaaagagcagttttgaaacactctttttgtagaatctgcaagaggatatttggatagctttgaagatttcttgggaaacgggaatgtcttcagataaactctagacagaagcattctcagaaacttctttgggatgtttcaattgaagtcacagtgttgaacattccctttcacagagcaggtttgaaacactctttttgtagtgtctataagtgaacatttggcgtgctttcaggcgtaacgtgaaaaaggaaatatcttcccataaaaaccagacagaagcgttctcagaaacttgttcttgatgtgtgccctctactgacagagttgaacctttctttgcaaagagcagctttgaaacactctttttgtagaatctgcaagaggatatttggatagctttgaggatttcgttggaaacgggtatgtcttcagataaactctagacagaagcattctcagaaacttctttgggatgttgcattcaagtcacagagtagaacattcccattcatagagcagatttgaaacactctttttgtagtatctggaagtggacatttggagcgctttcaggcctatgttgaaaaaggaaatatcttcccatgaaaactagacagaagcattctcagaaacttatttgtgatgtgtgccctcaactgacagtgttgaacctttgttttgatagagcagttctgaaacacactttttgtaaaatctgcaagaggatatttggatagctttgaggatttcgttggaaacgggaatgtcttcatgtaaactctagacagaagcattctcagaaactgctttgggatgtttcaattgaagtcccagtgttgaacattcccattcatagagcaggtttgaaacactctttttgtactatctggaagtggacatttggagcgctttcaggtctacggtgaaaaaggagatatcttccaataaaaactagatagaagcaatgtcagaacttttttcatgatgtatctactcagcacacagagttgaacctttcttttgagagagcagttttgaaacactctttttgtggaatatgcaagtgggtattaggccagcttggaggatttcgttggaaacgggaatacgtataaaaagcagacagcagcattgtcagaaactactttgtgatgtttgcattcaagtcacagaattgaacactccctttcacagagcaggtttgaaacactctttttgtagtgtctgtaagtgaacatatggattgctttcaggcctaaggtgaaaaaggaaatatcttcccataaaaactagacagaagcattctcagaaacttgtttgtgatgtgtgccctctactgacagagttgaacctttctttgcaaagaccagttttgaaacactctttttgtagaatctgcaagaggatatttggatagctttgaagatttcttgggaaacgggaatgtcttcagataaactctagacagaagcattctcagaaacttctttgggatgtttcaattgaagtcacagtgttgaacattccctttcacagagcaggtttgaaacactctttttgtagtgtctataagtgaacatttggcgtgctttcaggcctaacgtgaaaaaggaaatatcttcccataaaaactagacagaagcattctcagaaacttgttcgtgatgtgtgccctctactgacagagttgaacctttctttgcaaagagcagctttgaaacactctttttgtagaatctgcaagaggatatttggatagcttggaggatttcgttggaaacgggtatgtcttcagataaactctagacagaagcattctcagaaacttctttgggatgttgcatgcaagtcacagagtagaacattcccattcatagagcagatttgaaacactctttttgtagtatctggaagaggacatttggagcgctttcaggcctatgttgaaaaaggaaatatcttcccataaaaactagacggaagcattctcagaaacttaattgtgatgtgtttgctcaactaacaggattgaaccatcgttttgaaggagcagttttgaaacactgttttcgtggaatctgcaagtggatatttggctagctttgaggatttcgttggaaacgggattacatataaaaaggagacagcagcattctcagaaacttctttgtgatgtctgcattcaattcacagagttgagcattccctttcatagagcaggttggaaacactctttttgtagtatctggatgtggacatttggatcgctttcaggcctatggtgaaaaaggaaatatcttcccatgaaaactagacagaagcattctcagaaacttatttgtgatgtgtgcactcaactgacagtgttgaacctttgttttgatagagcagttctgaaacacactttttgtaaaatctgcaagaggatatttggatagctttgaggatttcgttggaaacgggaatgtcttcatgtaaactctagacagaagcattctcagaaactgctttgggatgtttcaattgaagtcccagcgttgaacattcccattcatagagcaggtttgaaacactctttttgtactatctggaagtggacatttggagcgctttcaggtctacggtgaaaaaggagatatcttccaataaaaactagatagaagcaatgtcagaacttttttcatgatgtatctactcagcaaacagagttgaacctttcttttgagagagcagttttgacacagtctttgtggaatatgcaagtgggtattaggccagcttggaggatttcgttggaaacgggaatacgtataaaaagcagacagcagcattgtcagaaactactttgtgatgtttgcattcaagtcacagaattgaacactccctttcacagagcaggtttgaaacactctttttgtagtgtctgtaagtgaacatttggattgctttcaggcctatggtgaaaaaggaaatatcttcccataaaaactagacagaagcattctcagaaacttgtttgtgatgtgtgccctctactgacagagttgaacctttctttgcaaagagcagttttgaaacactctttttgtagaatctgcaagaggatatttggatagctttgaggatttcttgggaaacgggaatgtcttcagataaactctagacagaagcattctcagaaacttctttgggatgtttcaattgaagtcagagtgttgaacattccctttcacagagcaggtttgaaacactctttttgtagtgtctataattgaacatttggcgtgctttcaggcctaacgtgaaaaaggaaatatcttcccataaaaactagacagaagcattctcagaaacttgttcgtgatgtgtgccctctactgacagagttgaacctttctttgcaaagagcagctttgaaacactctttttgtagaatctgcaagaggatatgtggatagctttgaggatttcgttggaaacgggtatgtcttcagataaactctagacagaagcattctcagaaacttctttgggatgtttcaattgaagtcacagtgttgaacattccctttcacagagcaggtttgaaacactctttttgtagtgtctataagtgaacatttggcgtgctttcaggcctaacgtgaaaaaggaaatatcttcccataaaaactagacagaagcattctcagaaacttgttcttgatgtgtcccttctactgacagagttgaacctttctttgcaaagagcagctttgaaacactctttttgtagaatctgcaagaggatatttggatagctttgaggatttcgttggaaacgggtatgtcttcagataaactctagacagaagcattctcagaaacttctttgggatgttgcattcaagtcacagagtagaacattcccattcatagagcagatttgaaacactctttttgtagtatctggaagtggacatttggagcgctttcaggcctatgttgaaaaaggaaatatcttcccataaaaactagacggaagcattctcagaaacttacttgtgatgtgtttgctcaactaacagaattgaaccatcgttttgaaggagcagttttgaaacactgttttcgtggaatctgcaagtggatatttggctagctttgaggatttcgttggaaacgggattacatataaaaaggagacagcagcattctcagaaacttctttgtgatgtctgcattcaagtcacagagttgagcattccctttcatagagcaggttggaaacactctttttgtagtatctggatgaggacatttggagcgctttcaggcctatggtgaaaaaggaaatatcttcccgtaaaaactagacagaagcattctcagaagtttatttgtgatgtgtgccctcaactaacagagttgaacctttcttttgatagagcagttttgaaacactctttttgtaaaatctgcaagaggatatttggatagctttgaggatttcgttgcaaacgggaatggcttcatataaactctagacagaaagcattctcagaaacttcgttgggatgtttcgattgaagtcccagtgttgaacattcccttttatagagcaggttggaaacactctttctgcattccctggaagtggacatttggagcgctttcaggacgacggtgaaaatggaaatatcttccaagaaaatctagatagaagcaatgtcagaaacttttatgtgatggatctactcagctaacagagttgaacctttcttttgagagagcagttttgcaacactctttttgtggaatatgcaagtggatattagggcagctttgaggatttcgttggaaacgggaatatatgtaaaaagcagacagcagcattctcagaaacttctttgtgatgtttgcattgaagtcacagagttgaacattccctttgagagagcaggtttgaaacacgccttttgtcatatctggaagtgtccattcggagcgcattcaggcttgtgttgaaaaaggaaatatcctcccataaaaactagacagaagcattctcagaaacttatctgtgatgtatgtactcaactaacagaactaaaccatccttttgaaggagcagttttgaaacactctttttgcggaatctgcaagtggatatttggctagcttgggaggatttcgttggaaacgggattacatacaaaaagcagacagcagcattctcagaaacttctttgtgatgtttgcattcaagtcacagagttgaacattccctttcatagagcaggtttgaaacactctttttgtagtatctggatgtggacatttggatcgctttcaggcctatggtgaaaaaggaaatatcttcccatgaaaactagacagaagcattctcagaaacttatttgtgatgtgtgccctcaactgacagtgttgaacctttgttttgatagagcagttctgaaacacactttttgtaaaatctgcaagaggatatttggatagctttgaggatttcgttggaaacgggaatgtcttcatgtaaactctagacagaagcattctcagaaactgctttgggatgtttcaattgaagtcccagtgttgaacattccctttcatagagcaggtttgaaacactctttttgtactatctggaagtggacatttggagcgctttcaggtctacggtgaaaaaggagatatcttccaataaaaactagatagaagcaatgtcagaacttttttcatgatgtatctactcagcaaacagagttgaacctttcttttgagagagcagttttgaaacactctttttgtggaatatgcaagtgggtattaggccagcttggaggatttcgttggaaacgggaatacgtataaaaatcagacagcagcattgtcagaaactactttgtgatgtttgcattcaagtcacagaattgaacactccctttcacagagcaggtttgaaacactctttttgtagtgtctgtaagtgaacatttggattgctttcaggcctaaggtgaaaaaggaaatatcttcccataaaaactagacagaagcattctcagaaacttgtttgtgatgtgtgccctctactgacagagttgaacctttctttgcaaagaccagttttgaaacactctttttgtagaatctgcaagaggatatttggatagctttgaggatttcttgggaaacgggaatgtcttcagataaactctagacagaagcattctcagaaacttctttgggatgtttcaattgaagtcacagtgttgaacattccctttcacagagcaggtttgaaacactctttttgtagtgtctataagtgaacatttggcgtgctttcaggcctaacgtgaaaaaggaaatatcttcccataaaaactagacagaagcattctcagaaacttgttcgtgatgtgtgccctctactgacagagttgaacctttctttgcaaagagcagctttgaaacacactttttgtagaatctgcaagaggatatttggatagcttggaggatttcgttggaaacgggtatgtcttcagataaactctagacagaagcattctcagaaacttctttgggatgttgcattcaagtcacagagtagaacattcccattcatagagcagatttgaaacactctttttgtagtatctggaagtggacatttggagcgctttcaggcctatgttgaaaaaggaaatatcttcccataaaaactagacggaagcattctcagaaacttatttgtgatgtgtttgctcaactaacaggattgaaccatcgttttgaaggagcagttttgaaacactgttttcgtggaatctgcaagtggatatttggctagcttgaggatttcgttggaaacgggattacatataaaaaggagacagccagcattctgagaaacttctttgtgatgtctgcattcaattcacagagttgagcattccctttcatagagcaggtttgaaacactctttttgtagtatctggatgtggacatttggatcgctttcaggcctatggtgaaaaaggaaatatcttcccatgaaaactagacagagcattctcagaaacttatttgtgatgtgtgccctcaactgacagtgttgaacctttgttttgatagagcagttctgaaacacactttttgtaaaatctgcaagaggatatttggatagctttgaggatttcgttggaaacgggaatgtcttcatgtaaactctagacagaagcattctcagaaactgctttgggatgtttcaattgaagtcccagtgttgaacattccctttcatagagcaggtttgaaacactctttttgtactatctggaagtggacatttggagcgctttcaggtctacggtgaaaaaggagatatcttccaataaaaactagatagaagcaatgtcagaacttttttcatgatgtatctactcagcaaacagagttgaacctttcttttgagagagcagttttgaaacactctttttgtggaatatgcaagtgggtattaggccagcttggaggatttcgttggaaacgggaatacgtataaaaagcagacagcagcattgtcagaaactactttgtgatgtttgcattcaagtcacagaattgaacactccctttcacagagcaggtttgaaacactctttttgtagtgtctgtaagtgaacatttggattgctttcaggcctaaggtgaaaaaggaaatatcttcccataaaaactagacagaagcattctcagaaacttgtttgtgatgtgtgccctctactgacagagttgaacctttctttgcaaagagcagttttgaaacactctttttgtagaatctgcaagaggatatttggatagctttgaggatttcttgggaaacgggaatgtcttcagataaactctagacagaagcattctcagaaacttctttgggatgtttcaattgaagtcacagtgttgaacattccctttcacagagcaggtttgaaacactctttttgtagtgtctataagtgaacatttggcgtgctttcaggcgtaacgtgaaaaaggaaatatcttcccataaaaaccagacagaagcattctcagaaacttgttcttgatgtgtcccctctactgacagagttgaacctttctttgcaaagagcagctttgaaacactctttttgtagaatctgcaagaggatatttggatagcttggaggatttcgttggaaacgggtatgtcttcagataaactctagacagaagcattctcagaaacttctttgggatgttgcattcaagtcacagagtagaacattcccattcatagagcagatttgaaacactctttttgtagtatctggaagtggacatttggagcgctttcaggcctatgttgaaaaaggaaatatcttcccataaaaactagacggaagcattctcagaaacttacgtgtgatgtgtttgctcaactaacagaattgaaccatcgttttgaaggagcagttttgaaacactgttttcgtggaatctgcaagtggatatttggctagctttgaggatttcgttggaaacgggattacatataaaaaggagtcagcagcattctcagcaaacttctttgtgatgtctgcattcaagtcacagagttgagcattccctttcatagagcaggttggaaacactctttttgtagtatctggatgaggacatttggagcgctttcaggcgtatggtgaaaaaggaaatatcttcccgtaaaaactagacagaagcattctcagaaatttatttgtgatgtgtgccctcaactaacagagttgaacctttcttttgatagagcagttttgaaacactctttttgtaaaatctgcaagaggatatttggatagctttgaggatttcgttgcaaacgggaatggcttcatataaactctagacagaagcattctcagaaacttcgttgggatgtttcgattgaagtcccagtgttgaacattcccttttatagagcaggttggaaacactctttctgcattccctggaagtggacatttggagcgctttcaggacgacggtgaaaatggaaatatcttccaagaaaatctagatagaagcaacgtcagaaacttttctgtgatggatctactcagctaacagagttgaacctttcttttgagagagcagttttgcaacactctttttgtggaatatgcaagtggatattagggcagctttgaggatttcgttggaaacgggaatacatgtaaaaagcagacagcagcattctcagaaacttctttgtgatgtttgcattgaagtcacagagttgaacattccctttgagagagcaggtttgaaacacgccttttgtcatatctggaagtgtccattcggagcgcattcaggcttgtgttgaaaaaggaaatatcctcccataaaaactagacagaagcattctcagaaacttatctgtgatgtatgtactcaactaacagaactaaaccatcgttttgaaggagcagttttgaaacactctttttgcggaatctgcaagtggatatttggctagctgggaggatttcgttggaaacgggattacatacaaaaagcagacagcagcattctcagaaacttctttgtgatgtttgcattcaagtcacagagttgaacattccctttcatagagcaggtttgaaacactctttttgtagtatctggatgtggacatttggatcgctttcaggcctatggtgaaaaaggaaatatcttcccatgaaaactagacagaagcattctcagaaacttatttgtgatgtgtgccctcaactgacagtgttgaacctttgttttgatagagcagttctgaaacacactttttgtaaaatctgcaagaggatatttggatagctttgaggatttcgttggaaacgggaatgtcttcatgtaaactctagacagaagcattctcagaaactgctttgggatgtttcaattgaagtcccagtgttgaacattcccattcatagagcaggtttgaaacactctttttgtactatctggaagtggacatttggagcgctttcaggtctacggtgaaaaaggagatatcttccaataaaaactagatagaagcaatgtcagaacttttttcatgatgtatctactcagctaacagagttgaacctttcttttgagagagcagttttgaaacactctttttgtggaatatgcaagtgggtattaggccagcttggaggatttcgttggaaacgggaatacgtataaaaagcagacagcagcattgtcagaaactactttgtgatgtttgcattcaagtcacagaattgaacactccctttcacagagcaggtttgaaacactctttttgtagtgtctgtaagtgaacatatggattgctttcaggcctaaggtgaaaaaggaaatatcttcccataaaaactagacagaagcattctcagaaacttgttcgtgatgtgtgccctctactgacagagttgaacctttctttgcaaagagcagctttgaaacactctttttgtagaatctgcaagaggatatgtggatagctttgaggatttcgttggaaacgggtatgtcttcagataaactctagacagaagcattctcagaaacttctttgggatgtttcaattgaagtcacagtgttgaacattccctttcacagagcaggtttgaaacactctttttgtagtgtctataagtgaacatttggcgtgctttcaggcctaacgtgaaaaaggaaatgtcttcccataaaaactagacagaagcattctcagaaacttgttcatgatgtgtgccctctactgacagagttgaacctttctttgcaaagagcagctttgaaacactctttttgtagaatctgcaagaggatatttggatagctttgaggatttcgttggaaacgggtatgtcttcagataaactctagacagaagcattctcagaaacttctttgggatgttgcattcaagtcacagagtagaacattcccattcatagagcagatttgaaacactctttttgtagtatctggaagtggacatttggagcgctttcaggcctatgttgaaaaaggaaatatcttcccataaaaactagacggaagcattctcagaaacttacttgtgatgtgtttgctcaactaacagaattgaaccatcgttttgaaggagcagttttgaaacactgttttcgtggaatctgcaagtggatatttggctagctttgaggatttcgttggaaacgggattacatataaaaaggagacagcagcattctcagaaacttctttgtgatgtctgcattcaagtcacagagttgagccttccctttcatagagcaggttggaaacactctttttgtagtatctggatgaggacatttggagcgctttcaggcgtatggtgaaaaaggaaatatcttcccgtaaaaactagacagaagcattctcagaaatttatttgtgatgtgtgccctcaactaacagagttgaacctttcttttgatagagcagttttgaaacactctttttgtaaaatctgcaagaggatatttggatagctttgaggatttcgttgcaaacgggaatggcttcatataaactctagacagaagcattctcagaaacttcgttgggatgtttcgattgaagtcccagtgttgaacattcccttttatagagcaggttggaaacactctttctgcattccctggaagtggacatttggagcgctttcaggacgacggtgaaaatggaaatatcttccaagaaaatctagatagaagcaacgtcagaaacttttctgtgatggatctactcagctaacagagttgaagctttcttttgagagagcagttttgcaacactctttttgtggaatatgcaagtggatattagggcagctttgaggatttcgttggaaacgggaatacatgtaaaaagcagacagcagcattctcagaaacttctttgtgatgtttgcattgaagtcacagagttgaacattccctttgagagagcaggtttgaaacacgccttttgtcatatctggaagtgtccattcggagcgcattcaggcttgtgttgaaaaaggaaatatcctcccataaaactagacagaagcattctcagaaacttatctgtgatgtatgtactcaactaacagaactaaaccatcgttttgaaggagcagttttgaaacactctttttgcggaatctgccagtggatatttggctagctgggaggatttcgttggaaacgggattacatacaaaaagcagacagcagcattctcagcaaacttatttgtgatgtgtgccctcaactgacagtgttgaacctttgttttgatagagcagttctgaaacacactttttgtaaaatctgcaagaggatatttggatagctttgaggatttcgttggaaacgggaatgtcttcatgtaaactctagacagaagcattctcagaaactgctttgggatgtttcaattgaagtcccagtgttgaacattccctttcatagagcaggtttgaaacactctttttgtactatctggaagtggacatttggagcgctttcaggtctacggtgaaaaaggagatatcttccaataaaaactagatagaagcaatgtcagaacttttttcatgatgtatctactcagcaaacagagttgaacctttcttttgagagagcagttttgaaacactctttttgtggaatatgcaagtgggtattaggccagcttggaggatttcgttggaaacgggaatacgtataaaaagcagacagcagcattgtcagaaactactttgtgatgtttgcattcaagtcacagaattgaacactccctttcacagagcaggtttgaaacactctttttgtagtgtctgtaagtgaacatatggattgctttcaggcctaaggtgaaaaaggaaatatcttcccataaaaactagacagaagcattctcagaaacttgtttgtgatgtgtgccctctactgacagagttgaacctttctttgcaaagagcagttttgaaacactctttttgtagaatctgcaagaggatatttggatagctttgaagatttcttgggaaacgggaatgtcttcagataaactctagacagaagcattctcagaaacttctttgggatgtttcaattgaagtcacagtgttgaacattccctttcacagagcaggtttgaaacactctttttgtagtgtctataagtgaacatttggcgtgctttcaggcctaacgtgaaaaaggaaatatcttcccataaaaactacacagaagcattctcagaaacttgttcatgatgtgtgccctctactgacagagttgaacctttctttgcaaagagcagctttgaaacactctttttgtagaatctgcaagaggatatttggatagcttggaggatttcgttggaaacgggtatgtcttcagataaactctagacagaagcattctcagaaacttctttgggatgttgcattcaagtcacagagtagaacattcccattcatagagcagatttgaaacactctttttgtagtatctggaagtggacatttggagcgctttcaggcctatgttgaaaaaggaaataccttcccataaaaactagacggaagcattctcagaaacttacttgtgatgtgtttgctcaactaacagaattgaaccatcgttttgaaggagcagttttgaaacactgttttcgtggaatctgcaagtggatatttggctagctttgaggatttcgttggaaacgggattacatataaaaaggagacagcagcattctcagaaacttctttgtgatttctgcattcaattcacagagttgagcattccctttcatagagcaggttggaaacactctttttgtagtatctggatgaggacatttggagcgctttcaggcgtatggtgaaaaaggaaatatcttcccgtgaaaactagacagaagcattctcagaaatttatttgtgatgtgtgccctcaactaacagagttgaacctttcttttgatagagcagttttgaaacactctttttgtaaaatctgcaagaggatatttggatagctttgaggatttcgttgcaaacgggaatggcttcatataaactctagacagaagcattctcagaaacttcgttgggatgtttcgattgaagtcccagtgttgaacattcccttttatagagcaggttggaaacactctttctgcattccctggaagtggacatttggagcgctttcaggacgacggtgaaaatggaaatatcttccaagaaaatctagatagaagcaacgtcagaaacttttctgtgatggatctactcagctaacagagttgaacctttcttttgagagagcagtttcgcaacactctttttgtggaatatgcaagtggatattagggcagctttgaggatttcgttggaaacgggaatacatgtaaaaagcagacagcagcattctcagaaacttctttgtgatgtttgcattgaagtcacagagttgaacattccctttgagagagcaggtttgaaacacgccttttgtcatatctggaagtgtccattcggagcgcattcaggcttgtgttgaaaaaggaaatatcctcccataaaaactagacagaagcattctcagaaacttatctgtgatgtatgtactcaactaacagaactaaaccatcgttttgaaggagcagttttgaaacactctttttgcggaatctgcaagtggatatttggctagctgggaggatttcgttggaaacgggattacatacaaaaagcagacagcagcattctcagaaacttctttgtgatgtttgcattcaagtcacagagttgaacattccctttcatagagcaggtttgaaacactctttttgtagtatctggatgtggacatttggatcgctttcaggcctatggtgaaaaaggaaatatcttcccatgaaaactagagagaagcattctcagaaacttatatgtgatgtgtgccctcaactgacagtgttgaacctttgttttgatagagcagttctgaaacacactttttgtaaaatctgcaagaggatatttggatagctttgaggatttcgttgcaaacgggaatggcttcatataaactctagacagaagctttctcagaaacttcattgtgatgtttcaactgaagtcacagtgttgaacagtccctttcatagagcaggtttgaaacactctttttgtagtatctggaagtggacatttggagcgctctcaggactactgtgaaaaaggaaatatcttccaataaaagctagatagaagcaatgtcagaaatttttcatgatgtatctactcagctaacagagttgaacctttcttttgagagaccagttttaaaacactctttttggggaatatgcaagtggatattaggccagcttggaggatttcgttggaaacgggaatccatataaaaagcagacagcagcattgtcagaaacttctttgtcatgtttgcattgaagtcccagagttcaacattccctttaatagagcaggtctgaaacacgccttttgtcatatctggacgttgtccatttggagcgcattccggcttgtgttgaaaaaggaaatatcctcccataaaaactagatagaagcattctcagaaacttatttgtgatgtgtgtactcaactaacagaattgaaccatcgttgtggaagagcagtttggaaacactctttttgtggaatctgcaagtggatatttgtctagctttgaggatttcgttggaaacgggattacatataaaaagcaggccgccagcattctcagaaacttctttgtgatgtctgcattcaagtcacagagttgagcattccctttcatagagcaggttggaaacactctttttgtagtatctggatgaggacatttggagcgctttcaggcgtatggtgaaaaaggaaatatcttcccgtaaaaactagacagagcattctcagaagtttatttgtgatgtgtgccctcaactaacagagttgaacctttcttttgatagagcagttttgaaacactctttttgtaaaatctgcaagaggatatttggatagctttgaggatttcgttgcaaacgggaatggcttcatataaactctaggcagaagcattctcagaaacttcgttgggatgtttcgattgaagtcccagtgttgaacattcccttttatagagcaggttggaaacactctttttgcattccctggaagtggacatttggagcgctttcaggacgacggtgaaaatggaaatatcttccaagaaaatctagatagaagcaatgtcagaaacttttatgtgatggatctactcagctaacagagttgaagctttcttttgagagagcagttttgcaacactctttttgtggaatatgcaagtggatattagggcagctttgaggatttcgttggaaacgggaatacatgtaaaaagcagacagcagcattctcagaaacttctttgtgatgtttgcattgaagtcacagagttgaacattccctttgagagagcaggtttgcaacacgccttttgtcatatctggaagtgtccattcggagcgcattcaggcttgtgttgaaaaaggaaatatcctcccataaaaactagacagaagcattctcagaaacttatttgtgatgtatgtactcaactaacagaactaaaccatcgttttgaaggagcagttttgaaacactctttttgcggaatctgcaactggatatttggctagcttggaggatttcgttggaaacgggattacataaaaaagcagacagcagcattctcagaaacttctttgtgatgtttgcattcaagtcgcagagttgaacattccctttcatagagcaggtttgaaacactctttttgtagtatctggatgtggacatttggatcgctttcaggcctatggtgaaaaaggaaatatcttcccatgaaaactagacagaagcattctcagaaacttatttgtgatgtgtgccctcaactgacagtgttgaacctttgttttgatagagcagttctgaaacacactttttgtaaaatctgcaagaggatatttggatagctttgaggatttcgttggaaacgggaatgtcttcatgtaaactctagacagaagcattctcagaaactgctttgggatgtttcaattgaagtcccagtgttgaacattccctttcatagagcaggtttgaaacactctttttgtagtatgtggaagtggacatttggagcgctttcaggtctacggtgaaaaaggagatatcttccaataaaaactagatagaagcaatgtcagaacttttttcatgatgtatctactcagcaaacagagttgaacctttcttttgagagagcagttttgaaacactctttttgtggaatatgcaagtgggtattaggccagcttggaggatttcgttggaaacgggaatacgtataaaaagcagacagcagcattgtcagaaactactttgtgatgcttgcattcaagtcacagaattgaacactccctttcacagagcaggtttgaaacactctttttgtagtgtctgtaagtgaacatttggattgctttcaggcctaaggtgaaaaaggaaatatcttcccataaaatctagacagaaagcattctcagaaacttgtttgtgatgtgtgccctctactgacagagttgaacctttctttgcaaagagaagttttgaaacactctttttgtagaacctgcaagaggatatttggatagctttgaggatttcttgggaaacgggaatgtcttcagataaactctagacagaagcattctcagaaacttctttgggatgtttcaattcaagtcacagtgttgaacattccctttcacagagcaggtttgaaacactctttttgtagtgtctataagtgaacatttggcgtgctttcaggcgtaacgtgaaaaaggaaatatcttcccataaaaactagacagaagcattctcagaaacttggtttgtgatgtgtgccctctactgacagagttgaacctttctttgcaaagagcagctttgaaacactctttttgtagaatctgcaagaggatatttggatagctttgaggatttcgttggaaacgggtatgtcttcagataaactctagacagaagcattctcagaaacttctttgggatgttgcattcaagtcacagagtagaacattcccattcatagagcagatttgaaacactctttttgtagtatctggaagtggacatttggagcgctttcaggcctatgttgaaaaaggaaatatcttcccataaaaactagacggaagcattctcagaaacttatttgtgatgtgtttgctcaactaacaggattgaaccatcgttttgaaggagcagttttgaaacactgttttcgtggaatctgcaagtggatatttggctagctttgaggatttcgttggaaacgggattacatataaaaaggagacagcagcattctcagaaacttctttgtgatgtctgcattcaattcacagagttgagcattccctttcatagagcaggttggaaacactctttttgtagtatctggatgaggacatttggagcgctttcaggcgtatggtgaaaaaggaaatatcttcccgtaaaaactagacagaagcattctcagaagtttatttgtgatgtgtgccctcaactaacagagttgaacctttcttttgatagagcagttttgaaacactctttttgtaaaatctgcaagaggatatttggatagctttgaggatttcgttgcaaacgggaatggcttcatataaactctagacagaagcattctcagaaacttcgttgggatgtttcgattgaagtcccagtgttgaacattcccttttatagagcaggttggaaacactctttctgcattccctggaagtggacatttggagcgctttcaggacgacggtgaaaatggaaatatcttccaagaaaatctagatagaagcaatgtcagaaacttttatgtgatggatctactcagctaacagagttgaacctttcttttgagagagcagttttgcaacactctttttgtggaatatgcaagtggatattagggcagctttgaggatttcgttggaaacgggaatacatgtaaaaagcagacagcagcattctcagaaacttctttgtgatgtttgcattgaagtcacagagttgaacattccctttgagagagcaggtttgaaacacgccttttgtcatatctggaagtgtccattcggagcgcattcaggcttgtgttgaaaaaggaaatatcctcccataaaaactagacagaagcattctcagaaacttatctgtgatgtatgtactcaactaacagaactaaaccatcgttttgaaggagcagttttgaaacactctttttgcggaatctgcaagtggatatttggctagctgggaggatttcgttggaaacgggattacatacaaaaagcagagagcagcattctcagaaacttctttgtgatgtttgcattcaagtcacagagttgaacattccctttcatagagcaggtttgaaacactctttttgtagtatctggatgtggacatttggatcgctttcaggcctatggtgaaaaaggaaatatcttcccatgaaaactagacagaagcattctcagaaacttatttgtgatgtgtgccctcaactgacagtgttgaacctttgttttgatagagcagttctgaaacacactttttgtaaaatctgcaagaggatatttggatagcttgaggatttcgttggaaacgggaatgtcttcatgtaaactctagacagaagcattctcagaaactactttgggatgtttcaattgaagtcccagtgttgaacattcccattcatagagcaggtttgaaacactctttttgtaatatctggaagtggacatttggagcgctttcaggtctacggtgaaaaaggagatatcttccaataaaaactagatagaagcaatgtcagaacttttttcatgatgtatctactcagctaacagagttgaacctttcttttgagagagcagttttgaaacactctttttgtggaatatgcaagtgggtattaggccagcttggaggatttcgttggaaacgggaatacgtataaaaagcagacagcagcattgtcagaaactactttgtgatgtttgcattcaagtcacagaattgaacactccctttcacagagcaggtttgaaacactctttttgtagtgtctgtaagtgaacatatggattgctttcaggcctaaggtgaaaaaggaaatatcttcccataaaaactagacagaagcattctcagaaacttgtttgtgatgtgtgccctctactgacagagttgaacctttctttgcaaagaccagttttgaaacactctttttgtagaatctgcaagaggatatttggatagctttgaggatttacttgggaaacgggaatgtcttcagataaactctagacagaagcattctcagaaacttctttgggatgtttcaattgaagtcacagtgttgaacattccctttcacagagcaggtttgaaacactctttttgtagtgtctataagtgaacatttggcgtgctttcaggcctaacgtgaaaaaggaaatatcttcccataaaaactagacagaagcattctcagaaacttgttcgtgatgtgtgccctctactgacagagttgaacctttctttgcaaagagcagctttgaaacacactttttgtagaatctgcaagaggatatttggatagcttggaggatttcgttggaaacgggtatgtcttcagataaactctagacagaagcattctcagaaacttctttgggatgttgcattcaagtcacagagtagaacattcccattcatagagcagatttgaaacactctttttgtagtatctggaagtggacatttggagcgctttcaggcctatgttgaaaaaggaaatatcttcccataaaaactagacggaagcattctcagaaacttacttgtgatgtgtttgctcaactaacagaattgaaccatcgttttgaaggagcagttttgaaacactgttttcgtggaatctgcaagtggatatttggctagctttgaggatttcgttggaaacgggattacatatacaaaggagacagcagcattctcagaaacttctttgtgatgtctgcattcaagtcacagagttgagcattccctttcatagagcaggttggaaacactctttttgtagtatctggatgaggacatttggagcgctttcaggcctatggtgaaaaaggaaatatcttcccgtaaaaactagacagaagcattctcagaaatttatttgtgatgtgtgccctcaactaacagagttgaacctttcttttgatagagcagttttgaaacactctttttgtaaaatctgcaagaggatatttggatagctttgaggatttcgttgcaaacgggaatggcttcatataaactctagacagaagcattctcagaaacttcgttgggatgtttcgattgaagtcccagtgttgaacattcccttttatagagcaggttggaaacactctttctgcattccctggaagtggacaattggagcgctttcaggacgacggtgaaaatggaaatatcttccaataaaatctggatagaagcaatgtcagaaacttttctgtgatggatctactcagctaacagagttgaacctttcttttgagagagcagttttgcaacactctttttgtggaatatgcaagtggatattagggcagctttgaggatttcgttggaaacgggaatacatgtaaaaagcagacagcagcattctcagaaacttctttgtgatgtttgcattgaagtcacagagttgaacattccctttgagagagcaggtttgaaacacgccttttgtcatatctggaagtgtccattcggagcgcattcaggcttgtgttgaaaaagaaaatatcctcccataaaaactagacagaagcattctcagaaacttatctgtgatgtatgtactcaactaaccgaactaaaccatcgttttgaaggagcagttttgaaacactctttttgcggaatctgcaagtggatatttggctagctgggaggatttcgttggaaacgggattacatacaaaaagcagacagcagcattctcagaaacttctttgtgatgtttgcattcaagtcacagagttgaacattccctttcatagagcaggtttgaaacactctttttgtagtatctggatgtggacatttggatcgctttcaggcctatggtgaaaaaggaaatatcttcccatgaaaactagacagaagcattctcagaaacttatttgtgatgtgtgccctcaactgacagtgttgaacctttgttttgatagagcagttctgaaacacactttttgtaaaatctgcaagaggatatttggatagctttgaggatttcgttgcaaacgggaatgtcttcatgtaaactctggacagaagcattctcagaaactgctttgggatgtttcaattgaagtcccagtgttgaacattcccattcatagagcaggtttgaaacactctttttgtactatctggaagtggacatttggagcgctttcaggtctacggtgaaaaaggagatatcttccaataaaaactagatagaagcaatgtcagaacttttttcatgatgtatctactcagcaaacagagttgaacctttcttttgagggagcagttttgaaacactatttttgtggaatatgcaagtgggtattaggccagcttggaggatttcgttggaaacgggaatacgtataaaaagcagacagcagcattgtcagaaactactttgtgatgtttgcattcaagtcacagaattgaacactccctttcacagagcaggtttgaaacactctttttgtagtgtctgtaagtgtacatttggattgctttcaggcctaaggtgaaaaaggaaatatcttcccataaaaactagacagaagcattctcagaaacttgtttgtgatgtgtgccctctactgacagagttgaacctttctttgcaaagagcagttttgaaacactctttttgtagaatctgcaagaggatatttggatagctttgaggatttcttgggaaacgggaatgtcttcagataaactctagacagaagcattctcagaaacttctttgggatgtttcaattgaagtcacagtgttgaacattccctttcacagagcaggtttgaaacactctttttgtagtgtctataagtgaacatttggcgtgctttcaggcctaacgtgaaaaaggaaatatcttcccataaaaactagacagaagcattctcagaaacttgttcgtgatgtgtgccctctactgacagagttgaacctttctttgcaaagagcagctttgaaacactctttttgtagaatctgcaagaggatatttggatagctttgaggatttcgttggaaacgggtatgtcttcagataaactctagacagaagcattctcagaaacttctttgggatgttgcattcaagtcacagagtagaacattcccattcatagagcagatttgaaacactctttttgtagtatctggaagtggacatttggagcgctttcaggcctatgttgaaaaaggaaatatcttcccataaaaactagacggaagcattctcagaaacttacttgtgatgtgtttgctcaactaacagaattgaaccatcgttttgaaggagcagttttgaaacactgttttcgtggaatctgcaagtggatatttggctagctttgaggatttcgttggaaacgggattacatataaaaaggagacagcagcattctcagaaacatctttgggatgtttgcattcaagtcacagagttgaacattccctttcacagagcaggtttgaaacactctttttgtggaatctggaagtggacatttggatcgctttgaggcctatggtgacaaagggaatatcttcgcataaaaactagacagaagcattctcagaaatttatttgtgatgtgtgccctcaactaacagagttgaacctttcttttgatagagcagttttgaaacactctttttgtaaaatctgcaagaggatatttggatagctttgaggatttcgttgcaaacgggaatggcttcatataaactctagacagaagcattctcagaaacttcgttgggatgtttcgattgaagtcccagtgttgaacattcccttttatagagcaggttggaaacactctttctgcattccctggaagtggacatttggagcgctttcaggacgacggtgaaaatggaaatatcttccaagaaaatctagatagaagcaacgtcagaaacttttctgtgatggatctactcagctaacagagttgaacctttcttttgagagagcagttttgcaacactctttttgtggaatatgcaagtggatattagggcagctttgaggatttcgttggaaacgggaatacatgtaaaaagcagacagcagcattctcagaaacttctttgtgatgtttgcattgaagtcacagagttgaacattccctttgagagagcaggtttgaaacacgccttttgtcatatctggaagtgtccattcggagcgcattcaggcttgtgttgaaaaaggaaatatcctcccataaaaactagacagaagcattctcagaaacttatctgtgatgtatgtactcaactaacagaactaaaccatcgttttgaaggagcagttttgaaacactctttttgcggaatctgcaagtggatatttggctagctgggaggatttcgttggaaacgggattacatacaaaaagcagacagcagcattctcagaaacttctttgtgatgtttgcattcaagtcacagagttgaacattccctttcatagagcaggtttgaaacactctttttgtagtatctggatgtggacatttggatcgctttcaggcctatggtgaaaaatgaaatatcttcccatgaaaactagacagaagcattctcagaaacttatttgtgatgtgtgccctcaactgacagtgttgaacctttgttttgatagagcagttctgaaacacactttttgtaaaatctgcaagaggatatttggatagctttgaggatttcgttggaaacgggaatgtcttcatgtaaactctagacagaagcattctcagaaactgctttgggatgtttcaattgaagtcccagtgttgaacattccctttcatagagcaggtttgaaacactctttttgtactatctggaagtggacatttggagcgctttcaggtctacggtgaaaaaggagatatcttccaataaaaactagatagaagcaatgtcagaacttttttcatgatgtatctactcagcaaacagagttgaacctttcttttgagagagcagttttgaaacactctttttgtggaatatgcaagtgggtattaggccagcttggaggatttcgttggaaacgggaatacgtataaaaagcagacagcagcattgtcagaaactactttgtgatgtttgcattcaagtcacagaattgaacactccctttcacagagcaggtttgaaacactctttttgtagtgtctgtaagtgaacatttggattgctttcaggcctaaggtgaaaaaggaaatatcttcccataaaaactagacagaagcattctcagaaacttgtttgtgatgtgtgccctctactgacagagttgaacctttctttgcaaagaccagttttgaaacactctttttgtagaatctgcaagaggatatttggatagctttgaggatttcttgggaaacgggaatgtcttcagataaactctagacagaagcattctcagaaacttctttgggatgtttcaattgaagtcagtgttgaacattccctttcacagagcaggtttgaaacactctttttgtagtgtctataagtgaacatttggcgtgctttcaggcgtaacgtgaaaaaggaaatatcttcccataaaaactagacagaagcattctcagaaacttgttcgtgatgtgtgccctctactgacagagttgaacctttctttgcaaagagcatctttgaaacactctttttgtagaatctgcaagaggatatttggatagcttggaggatttcgttggaaacgggtatgtcttcagataaactctagacagaagcattctcagaaacttctttgggatgttgcattcaagtcacagagtagaacattcccattcatagagcagatttgaaacactctttttgtagtatctggaagtggacatttggagcgctttcaggcctatgttgaaaaaggaaatatcttcccataaaaactagacggaagcattctcagaaacttatttgtgatgtgtttgctcaactaacaggattgaaccatcgttttgaaggagcagttttgaaacactgttttcgtggaatctgcaagtggatatttggctagctttgaggatttcgttggaaacggggttacatatacaaaggagacagcagcattcccagaaacttctttgtgatgtctgcattcaattcacagagttgagcattccctttcatagagcaggttggaaacactctttttgtagtatctggatgaggacatttggagcgctttcaggcctatggtgaaaaaggaaatatcttcccgtaaaaactagacagaagcattctcagaaatttatttgtgatgtgtgccctcaactaacagagttgaacctttcttttgatagagcagttttgaaacactctttttgtaaaatctgcaagaggatatttggatagctttgaggatttcgttgcaaacgggaatggcttcatataaactctagacagaagcattctcagaaacttcgttgggatgtttcgattgaagtcccagtgttgaacattcccttttatagagcaggttggaaacactctttctgcattccctggaagtggacatttggagcgctttcaggacgacggtgaaaatggaaatatcttccaagaaaatctagatagaagcaatgtcagaaacttttatgtgatggatctactcagctaacagagttgaacctttcttttgagagagcagttttgcaacactctttttgtggaatatgcaagtggatattagggcagctttgaggatttcgttggaaacgggaatacatgtaaaaagcagacagcagcattctcagaaacttctttgtgatgtttgcattgaagtcacagcagttgaacattccctttgagagagcaggtttgaaacacgccttttgtcatatctggaagtgtccattcggagcgcattcaggcttgtgttgaaaaaggaaatatcctcccataaaaactagacagaagcattctcagaaacttatctgtgatgtatgtactcaactaacagaactaaaccatccttttgaaggagcagttttgaaacactctttttgcggaatctgcaagtggatatttggctagctgggaggatttcgttggaaacgggattacatacaaaaagcagacagcagcattctcagaaacttctttgtgatgtttgcattcaagtcacagagttgaacattccctttcatagagcaggtttgaaacactctttttgtagtatctggatgtggacatttggatcgctttcaggcctatggtgaaaaaggaaatatcttcccatgaaaactagacagaagcattctcagaaacttatttgtgatgtgtgccctcaactgacagtgttgaacctttgttttgatagagcagttctgaaacacactttttgtaaaatctgcaagaggatatttggatagctttgaggatttcgttggaaacgggaatgtcttcatgtaaactctacacagaagcattctcagaaactgctttgggatgtttcaattgaagtcccagtgttgaacattcccattcatagagcaggtttgaagcactctttttgtactatctggaagtggacatttggagcgctttcaggtctacggtgaaaaaggagatatcttccaataaaaactagatagaagcaatgtcagaacttttttcatgatgtatctactcagcaaacagagttgaacctttcttttgagagagcagttttgaaacactctttttgtggaatatgaaagtgggtattaggccagcttggaggatttcgttggaaacgggaatacgtataaaaagcagacagcagcattgtcagaaactactttgtgatgtttgcattcaagtcacagaactgaacactccctttcacagagcaggtttgaaacactctttttgtagtgtctgtaagtgaacatttggattgctttcaggcctaaggtgaaaaaggaaatatcttcccataaaaactagacagaagcattctcagaaacttgtttgtgatgtgtgccctctactgacagagttgaacctttctttgcaaagagcagttttgaaacactctttttgtagaatctgcaagaggatatttggatagctttgaggatttcttgggaaacgggaatgtcttcagataaactctagacagaagcattctcagaaacttctttgggatgtttcaatagaagtcacagtgttgaacattccctttcacagagcaggtttgaaacactctttttgtagtgtctataattgaacatttggcgtgctttcaggcctaacgtgaaaaaggaaatatcttcccataaaaactagacagaagcattctcagaaacttgttcgtgatgtgtgccctctactgacagagttgaacctttctttgcaaagagcagctttgaaacactctttttgtagaatctgcaagaggatatgtggatagctttgaggatttcgttggaaacgggtatgtcttcagataaactctagacagaagcattctcagaaacttctttgggatgtttcaattgaagtcacagtgttgaacattccctttcacagagcatgtttgaaacactctttttgtagtgtctataagtgaacatttggcgtgctttcaggcctaacgtgaaaaaggaaatatcttcccataaaagctagacagaagcattctcagaaacttgtttgtgatgtgtgccctctactgacagagttgaacctttctttgcaaagagcagctttgaaacactctttttgtagaatctgcaagaggatatttggatagctttgaggatttcgttggaaacgggtatgtcttcagataaactctagacacaagcattctcagaaacttcgttgggatgtttcgattgaagtcacagtgttgaacattcctttttatagagcaggtttgaaacactctttttgtagtatctggaagtggacatttggagcgctttcaggacgacggtgaaaatggaaatatcttccaataaaatctagatagaagcaatgtcagaaactttcatgtcatgtatctactcagctaacagagttgaaactttcttttgagaaagcagttttgcaacactcttttcgtggaatatgcaagtggatattagggcagctttgaggattttgttggaaacggcaatacatataaaaagcagacagcagcattctcagaaacttctttgtgatgtttgcattgaagtcacagcagttgaacattccctttgagagagcaggtttgaaacacgccttttgtcatatctggaagtgtccattcggagcgcattcaggcttgtgttgaaaaaggaaatatcctcccagaaaaactagacagaagcattctcagaaacttatctgtgatgtatgtactcaactaacagaactaaaccatcgttttgaaggagcagttttgaaacactctttttgcggaatctgcaagtggatatttggctagctgggaggatttcgttggaaacgggattacatacaaaaagcagacagcagcattctcagaaacttctttgtgatgtttgcattcaagtcacagagttgaacattccctttcatagagcaggtttgaaacactctttttgtagtatctggatgtggacatttggatcgctttcaggcctatggtgaaaaaggaaatatcttcccatgaaaactagacagaagcattctcagaaacttatttgtgatgtgtgccctcaactgacagtgttgaacctttgttttgatagagcagttctgaaacacactttttgtaaaatctgcaagaggatatttggatagctttgaggatttcgttggaaacgggaatgtcttcatgtaaactctacacagaagcattctcagaaactgctttgggatgtttcaattgaagtcccagtgttgaaccttcccattcatagagcaggtttgaaacactctttttgtactatctggaagtggacattttgagcgctttcaggtctacggtgaaaaaggagatatcttccagtaaaaactagatagaagcaatgtcagaacttttttcatgatatatctactcagctaacagagttgaacctttcttttgagagagcagttttgaaacactctttttgtggaatatgcaagtgggtattaggccagcttggaggatttcgttggaaacgggaatacgtataaaaagcagacagcagcattgtcagaaactactttgtgatgtttgcattcaagtcacagaattgaacactccctttcacagagcaggtttgaaacactctttttgtagtgtctgtaagtgaacatatggattgctttcaggcctaaggtgaaaaaggaaatatcttcccataaaaactagacagaagcattctcagaaacttgtttgtgatgtgtgccctctactgacagagttgaacctttctttgcaaagagcagttttgaaacactctttttgtagaatctgcaagaggatatttggatagctttgaggatttcttgggaaacgggaatgtcttcagataaactctagacagaagcattctcagaaacttctttgggatgtttcaattgaagtcacagtgttgaacattccctttcacagagcaggtttgaaacactctttttgtagtgtgtataagtgaacatttggcgtgctttcaggcctaacgtgaaaaaggaaatatcttcccataagaactagacagaagcattctcagaaacttgtttgtgatgtgtgccctctactgacagagttgaacctttccttgcaaagagcagctttgacacactctttttgtagaatctgcaagaggctatttggatagctttgaggatttcgttggaaactgttatgtcttcagataaactctagacagaagcattctcagaaacttctttgagatgttgcattcaagtcacagagtagaacattcccattcatagagcagatttgaaacactctttttgtagtatctgaaagtggacatttggagcgctttcaggcctatgatgaaaaaggaaatatcttcccataaaaactagacggaagcattctcagaaacttacttgtgatgtgtttgctcaactaacagaattgaaccatcgttttgaaggagcagttttgaaacactgttttcgtggaatctgcaagtggatatttggctagctttgaggatttcgttggaaacgggattacatataaaaaggagacagcagcattctcagaaacttctttgtgatgtctgcattcaagtcacagagttgagcattccctttcatagagcaggttggaaacactctttttgtagtatctggatgaggacatttggagcgctttcaggcgtatggtgaaaaaggaaatatcttcccgtaaaaactagacagaagcattctcagaaatttatttgtgatgtgtgccctcaactaacagagttgaacctttcttttgatagagcagttttgaaacactctttttgtaaaatctgcaagaggatatttggatagctttgaggatttcgttgcaaacgggaatggcttcatataaactctagacagaagcattctcagaaacttcgttgggatgtttcgattgaagtcccagtgttgaacattcccttttatagagcaggttggaaacactctttctgcattccctggaagtggacatttggagcgctttcaggacgacggtgaaaatggaaatatcttccaagaaaatctagatagaagcaacgtcagaaacttttctgtgatggatctactcagctaacagagttgaacctttcttttgagagagcagttttgcaacactctttttgtggaatatgcaagtggatattagggcagctttgaggatttcgttggaaacgggaatacatgtaaaaagcagacagcagcattctcagaaacttctttgtgatgtttgcattgaagtcacagagttgaacattccctttgagagagcaggtttgaaacacgccttttgtcatatctggaagtgtccattcggagcgcattcaggcttgtgttgaaaaaggaaatatcctcccataaaaactagacagaagcattctcagaaacttatctgtgatgtatgtactcaactaacagaactaaaccatcgttttgaaggagcagttttgaaacactctttttgcggaatctgcaagtggatatttggctagctgggaggatttcgttggaaacgggattacatacaaaaagcagacagcagcattctcagaaacttctttgtgatgtttgcattcaagtcacagagttgaacattccctttcatagagcaggtttgaaacactctttttgtagtatctggatgtggacatttggatcgctttcaggcctatggtgaaaaaggaaatatcttcccatgaaaactagacagaagcattctcagaaacttatttgtgatgtgtgccctcaactgacagtgttgaacctttgttttgatagagcagttctgaaacacactttttgtaaaatctgcaagaggatatttggatagctttgaggatttcgttggaaacgggaatgtcttcatgtaaactctacacagaagcattctcagaaactgctttgggatgtttcaattgaagtcccagtgttgaacattcccattcatagagcaggtttgaaacactctttttgtactatctggaagtggacatttggagcgctttcaggtctacggtgaaaaaggagatatcttccaataaaaactagatagaagcaatgtcagaacttttttcatgatgtatctactcagcaaacagagttgaacctttcttttgagagagcagttttgaaacactctttttgtggaatatgcaagtgggtattaggccagcttggaggatttcgttggaaacgggaatacgtataaaaagcagacagcagcattgtcagcaaactactttgtgatgtttgcattcaagtcacagaattgaacactccctttcacagagcaggtttgaaacactctttttgtagtgtctgtaagtgaacatttggattgatttcaggcctaaggtgaaaaaggaaatatcttcccataaaaactagacagaagcattctcagaaacttgtttgtgatgtgtgccctctactgacagagttgaacctttctttgcaaagagcagttttgaaacactctttttgtagaatctgcaagaggatatttggatagctttgaggatttcttgggaaacgggaatgtcttcagataaactctagacagaagcattctcagaaacttctttgggatgtttcaattgaagtcacagtgttgaacattccctttcacagagcaggtttgaaacactctttttgtagtgtctataagtgaacatttggcgtgctttcaggcgtaacgtgaaaaaggaaatatcttcccataaaaaccagacagaagcattctcagaaacttgttcgtgatgtgtgccctctactgacagagttgaacctttctttgcaaagagcagctttgaaacactctttttgtagaatctgcaagaggatatttggatagctttgaggatttcgttggaaacgggtatgtcttcagataaactctagacagaagcattctcagaaacttctttgggatgttgcattcaagtcacagagtagaacattcccattcatagagcagatttgaaacactctttttgtagtatctggaagtggacatttggagcgctttcaggcctatgttgaaaaaggaaatatcttcccataaaaactagacggaagcattctcagaaacttacttgtgatgtgtttgctcaactaacagaattgaaccatcgttttgaaggagcagttttgaaacactgttttcgtggaatctgcaagtggatatttggctagctttgaggatttccttggaaacgggattacatataaaaaggagacagcagcattctcagaaacttctttgtgatgtctgcattcaagtcacagagttgagcattccctttcatagagcaggttggaaacactctttttgtagtatctggatgaggacatttggagcgctttcaggcgtatggtgaaaaaggaaatatcttcccgtaaaaactagacagaagcattctcagaagtttatttgtgatgtgtgccctcaactaacagagttgaacctttcttttgatacagcagttttgaaacactctttttgtaaaatctgcaagaggatatttggatagctttgaggatttcgttgcaaacgggaatggcttcatataaactctagacagaagcattctcagaaacttcgttgggatgtttcgattgaagtcccagtgttgaacattcccttttatagagcaggttggaaacactctttctgcattccctggaagtggacatttggagcgctttcaggacgacggtgaaaatggaaatatcttccaagaaaatctagatagaagcaacgtcagaaacttttctgtgatggatctactcagctaacagagttgaacctttcttttgagagagcagttttgcaacactctttttgtgaaatatgcaagtggatattagggcagctttgaggatttcgttggaaacgggaatacatgtaaaaagcagacagcagcattctcagaaacttgtttgtgatgtttgcattgaagtcacagagttgaacattccctttgagagagcaggtttgaaacacgccttttgtcatatctggaagtgtccattcgaagcgcattcaggcttgtgttgaaaaaggaaatatcctcccataaaaactagacagaagcattctcagaaacttatctgtgatgtatgtactcaactaacagaactaaaccatcgttttgaaggagcagttttgaaacactctttttgcggaatctgcaagtggatatttggctagctgggaggatttcgttggaaacgggattacatacaaaaagcagacagcagcattctcagaaacttctttgtgatgtttgcattcaagtcacagagttgaacattccctttcatagagcaggttggaaacactctttttgtagtatctggatgtggacatttggatcgctttcaggcctatggtgaaaaaggaaatatcttcccatgaaaactagacagaagcattctcagaaacttatttgtgatgtgtgccctcaactgacagtgttgaacctttgttttgatagagcagttctgaaacacactttttgtaaaatctgcaagaggatatttggatagctttgaggatttcgttggaaacgggaatgtcttcatgtaaactctacacagaagcattctcagaaactgctttgggatgtttcaattgaagtcccagtgttgaacattccctttcatagagcaggtttgaaacactctttttgtactatctggaagtggacatttggagcgctttcaggtctacggtgaaaaaggagatatcttccaataaaaactagatagaagcaatgtcagaacttttttcatgatgtatctactcagcaaacagagttgaacctttcttttgagagagcagttttgaaacactctttttgtggaatatgcaagtgggtattaggccagcttggaggatttctttggaaacgggaatacgtataaaaagcagacagcagcattgtcagaaactactttgtgatgtttgcattcaagtcacagaattgaacactccctttcacagagcaggtttgaaacactctttttgtagtgtctgtaagtgaacatttggattgctttcaggcctaaggtgaaaaaggaaatatcttcccataaaaactagacagaagcattctcagaaacttgtttgtgatgtgtgccctctactgacagagttgaacctttctttgcaaagaccagttttgaaacactctttttgtagaatctgcaagaggatatttggatagctttgaggatttcttgggaaacgggaatgtcttcagataaactctagacagaagcattctcagaaacttctttgggatgtttcaattgaagtcacagtgttgaacattccctttcacagagcaggtttgaaacactctttttgtagtgtctataagtgaacatttggcgtgctttcaggcgtaacgtgaaaaaggaaatatcttcccataaaaaccagacagaagcattctcagaaacttgttcgtgatgtgtgccctctactgacagagttgaacctttctttgcaaagagcagctttgaaacacactttttgtagaatctgcaagaggatatttggatagtgtttgaggatttcgttggaaacgggtatgtcttcagataaactctagacagaagcattctcagaaacttctttgggatgttgcatgcaagtcacagagtagaacattcccattcatagagcagatttgaaacactctttttgtagtatctggaagtggacatttggagcgctttcaggcctatgttgaaaaaggaaatatcttcccataaaaactagacggaagcattctcagaaacttaattgtgatgtgtttgctcaactaacaggattgaaccgtcgttttgaaggagcagttttgaaacactgttttcgtggaatctgcaagtggatatttggctagctttgaggatttcgttggaaacgggattacatataaaaaggagacagcagcattctcagaaacttctttgtgatgtctgcattcaattcacagagttgagcattccttttcatagagcaggttggaaacactctttttgtagtatctggatgaggacatttggagcgctttcaggcgtatggtgaaaagggaaatatcttcccgtaaaaactagacagaagcattctcagaagtttatttgtgatgtgtgccctcaactaacagagttgaacctttcttttgatagagcagttttgaaacactctttttgtaaaatctgcaagaggatatttggatagctttgaggatttcgttgcaaacgggaatggcttcatataaactctagacagaagcattctcagaaacttcgttgggatgtttcgattgaagtcccagtgttgaacattcccttttatagagcaggttggaaacactctttctgcattccctggaagtggacatttggagcgctttcaggacgacggtgaaaatggaaatatcttccaagaaaatctagatagaagcaatgtcagaaacttttatgtgatggatctactcagctaacagagttgaacctttcttttgagagagcagttttgcaacactccttttgtggaatatgcaagtggatattagggcagctttgaggatttcgttggaaacgggaatacatgtaaaaagcagacagccagcattctcagaaacttctttgtgatgtttgcattgaagtcacagagttgaacattccctttgagagagcaggtttgaaacacgccttttgtcatatctggaagtgtccattcggagcgcattcaggcttgtgttgaaaaaggaaatatcctcccataaaaactagacagaagcattctcagaaacttatttgtgatgtatgtactcaactaacagaactaaaccatcgttttgaaggagcagttttgaaacactctttttgcggaatctgcaagtggatatttggctagctgggaggatttcgttggaaacgggattacatacaacaagcagacagcagcattctgagaaacttctttgtgatgtttgcattcaagtcacagagttgaacattccctttcatagagcaggtttgaaacactctttttgtagtatctggatgtggacatttggatcgctttcaggcctatggtgaaaaaggaaatatcttcccatgaaaactagacagaagcattctcagaaacttatttgtgatgtgtgccctcaactgacagtgttgaacctttgttttgatagagcagttctgaaacacactttttgtaaaatctgcaagaggatatttggatagctttgaggatttcgttggaaacgggaatgtcttcatgtaaactctagacagaagcattctcagaaactgctttgggatgtttcaattgaagtcccagtgttgaacattcccattcatagagcaggtttgaaacactctttttgtactatctggaagtggacatttggagcgctttcaggtctacggtgaaaaaggagatatcttccaataaaaactagatagaagcaatgtcagaacttttttcatgatgtatctactcagcaaacagagttgaacctttcttttgagagagcagttttgaaacactctttttgtggaatatgcaagtgggtattaggccagcttggaggatttcgttggaaacgggaatacgtataaaaagcagacagcagcattgtcagaaactactttgtgatgtttgcattcaagtcacagaattgaacactccctttcacagagcaggtttgaaacactctttttgtagtgtctgtaagtgaacatttggattgctttcaggcctaaggtgaaaaaggaaatatcttcccataaaaactagacagaagcattctcagaaacttgtttgtgatgtgtgccctctactgacagagttgaacctttctttgcaaagagcagttttgaaacactctttttgtagaatctgcaagaggatatttggatagctttgaggatttcttgggaaacgggaatgtcttcagataaactctagacagaagcattctcagaaacttctttgggatgtttcaattgaagtcacagtgttgaacattccctttcacagagcaggtttgaaacactctttttgtagtgtctataagtgaacatttggcgtgctttcaggcctaacgtgaaaaaggaaatatcttcccataaaaactagacagaagcattctcagaaacttgttcgtgatgtgtgccctctactgacagagttgaacctttctttgcaaagagcagctttgaaacactctgtttgtagaatctgcaagaggatatttggatagcttggaggatttcgttggaaacgggtatgtcttcagataaactctagacagaaacattctcagaaacttctttgggatgttgcattcaagtcacagagtagaacattcccatgcatagagcagatttgaaacactctttttgtagtatctggaagtggacatttggagcgctttcaggcctatgttgaaaaaggaaatatcttcccataaaaactagacgggaagcattctcagaaacttatttgtgatgtgtttgctcaactaacaggattgaaccatcgttttgaaggagcagttttgaaacactgttttcgtggaatctgcaagtggatatttggctagctttgaggatttcgttggaaacgggattacatatacaaaggagacagccagcattctcagtaaacttctttgtgatgtctgcattcaattcacagcagttgagcattccctttcatagagcaggttggaaacactctttttgtagtatctggatgaggacatttggagcgctttcaggcgtatggtgaaaaaggaaatatcttcccgtaaaaactagacagaagcattctcagaagtttatttgtgatgtgtgccctcaactaacagagttgaacctttcttttgatagagcagttttgaaacactctttttgtaaaatctgcaagaggatatttggatagctttgaggatttcgttgcaaacgggaatggcttcatataaactctagacagaagcattctcagaaacttcgttgggatgtttcgattgaagtcccagtgttgaacattcccttttatagagcaggttggaaacactctttctgcattccctggaagtggacatttggagcgctttcaggacgacggtgaaaatggaaatatcttccaagaaaatctagatagaagcaatgtcagaaacttttatgtgatggatctactcagctaacacagttgaacctttcttttgagagagcagttttgcaacactctttttgtggaatatgcaagtggatattagggcagctttgaggatttcgttggaaacgggaatacatgtaaaaagcagacagcagcattctcagaaacttactttgtgatgtttgcattgaagtcacagagttgaacattccctttgagagagcaggattgaaacacgccttttgtcatatctggaagtgtccattcggagcgcattcaggcttgtgttgaaaaaggaaatatcctcccataaaaagtatacagaagcattctcagaaacttatctgtgatgtatgtactcaactaacagcaactaaaccatcgttttgaaggagcagttttgaaacactctttttgcggaatctgcaagtggatatttggctagctgggaggatttcgttggaaacgggattacatacaaaaagcagacagcagcattctcagaaacttctttgtgatgtttgcattcaagtcacagagttgaacattccctttcatagagcaggtttgaaacactctttttgtagtatctggatgtggacatttggatcgctttcaggcctatggtgaaaaaggaaatatcttcccatgaaaactagacagaagcattctcagaaacttatttgtgatgtgtgccctcaactgacagtgttgaacctttgttttgatagagcagttctgaaacacactttttgtaaaatctgcaagaggatatttggatagctttgaggatttcgttggaaacgggaatgtcttcatgtaaactctagacagaagcattctcagaaactgctttgggatgtttcaattgaagtcccagtgttgaacattcccattcatagagcaggtttgaaacactctttttgtagtatctggaagtggacatttggagcgctttcaggtctacggtgaaaaaggagatatcttccaataaaaactagatagaagcaatgtcagaacttttttcatgatgtatctactcagctaacagagttgaacctttcttttgagagagcagttttgaaacactctttgtgtggaatatgcaagtgggtattaggccagcttggaggatttcgttggaaacgggaatacgtataaaaagcagacagcagcattgtcagaaactactttgtgatgtttgcattcaagtcacagaattgaacactccctttcacagagcaggtttgaaacactctttttgtagtgtctataagtgaacatttggcgtgctttcaggcctaaggtgaaaaaggaaatatcttcccataaaaactagacagaagcattctcagaaacttgtttgtgatgtgtgccctctactgacagagttgaacctttctttgcaaagagcagctttgaaacactctttttgtagaatctgtaagaggatatttggatagctttgaggatttcgttggaaacgggtatgtcttcagataaactctagacagaagcattctcagaaacttctttgggatgttgcattcaagtcacagagtagaacattcccattcatagagcagatttgaaacactctttttgtagtatctggaagtggacatttggagcgctttcaggcctatgttgaaaaaggaaatatcttcccataaaaactagacggaagcattctcagaaacttacttgtgatgtgtttgctcaactaacagaattgaaccatcgttttgaaggagcagttttgaaacactgttttcgtggaatctgcaagtggatatttggctagctttgaggatttcgttggaaacgggattacatataaaaaggagacagcagcattctcagaaacttctttgtgatgtctgcattcaagtcacagagttgagcattccctttcatagagcaggttggaaacactctttttgtagtatctggatgaggacatttggagcgctttcaggcgtatggtgaaaaaggaaatatcttcccgtaaaaactagacagaagcattctcagaaatttatttgtgatgtgtgccctcaactaacagagttgaacctttcttttgatagagcagttttgaaacactctttttgtaaaatctgcaagaggatatttggatagctttgaggatttcgttgcaaacgggaatggcttcatatacactctagacagaagcattctcagaaacttcgttgggatgtttcgattgaagtcccagtgttgaacattcccttttatagagcaggttggaaacactctttctgcattccctggaagtggacatttggagcgctttcaggacgacggtgaaaatggaaatatcttccaagaaaatctagatagaagcaacgtcagaaacttttctgtgatggatctactcagctaacagagttgaacctttcttttgagagagcagttttgcaacactctttttgtggaatatgcaagtggatattagggcagctttgaggatttcgttggaaacgggaatacatgtaaaaagcagacagcagcattctcagaaacttctttgtgatgtttgcattgaagtcacagagttgaacattccctttgagagagcaggtttgaaacacgccttttgtcatatctggaagtgtccattcggagcgcattcaggcttgtgttgaaaaaggaaatatcctcccataaaaactagacagaagcattctcagaaacttatctgtgatgtatgtactcaactaacagaactaaaccatcgttttgaaggagcagttttgaaacactctttttgcggaatctgcaagtggatatttggctagctgggaggatttcgttggaaacgggattacatacaaaaagcagacagcagcattctcagaaacttctttgtgatgtttgcattcaagtcacagagttgaacattccctttcatagagcaggtttgaaacactctttttgtagtatctggatgtggacatttggatcgctttcaggcctatggtgaaaaaggaaatatcttcccatgaaaactagacagaagcattctcagaaacttatttgtgatgtgtgccctcaactgacagtgttgaacctttgttttgatagagcagttctgaaacacactttttgtaaaatctgcaagaggatatttggatagctttgaggatttcgttggaaacgggaatgtcttcatgtaaactctagacagaagcattctcagaaactgctttgggatgtttcaattgaagtcccagtgttgaacattccctttcatagagcaggtttgaaacactctttttgtactatctggaagtggacatttggagcgctttcaggtctacggtgaaaaaggagatatcttccaataaaaactagatagaagcaatgtcagaacttttttcatgatgtatctactcagcaaacagagttgaacctttcttttgagagagcagttttgaaacactctttttgtggaatatgcaagtgggtattaggccagcttggaggatttcgttggaaacgggaatacgtataaaaagcagacagcagcattgtcagaaactactttgtgatgtttgcattcaagtcacagaattgaacactccctttcacagagcaggtttgaaacactctttttgtagtgtctgtaagtgaacatttggattgctttcaggcctaaggtgaaaaaggaaatatcttcccataaaaactagacagaagcattctcagaaacttgtttgtgatgtgtgccctctactgacagagttgaacctttctttgcaaagggcagttttgaaacactctttttgtagaatctgcaagaggatatttggatagctttgaggatttcttgggaaacgggaatgtcttcagataaactctagacagaagcattctcagaaacttctttgggatgtttcaattgaagtcacagtgttgaacattccctttcacagagcaggtttgaaacactctttttgtagtgtctataagtgaacatttggcgtgctttcaggcctaacgtgaaaaaggaaatatcttcccataaaaactagacagaagcattctcagaaacttgttcgtgatgtgtgccctctactgacagagttgaacctttctttgcaaagagcagctttgaaacacactttttgtagaatctgcaagaggatatttggatagctttgaggatttcgttggaaacgggtatgtcttcagataaactctagacagaagcattctcagaaacttctttgggatgttgcattcaagtcacagagtagaacattcccattcatagagcagatttgaaacactctttttgtagtatctggaagtggacatttggagcgctttcaggcctatgttgaaaaaggaaatatcttcccataaaaactagacggaagcattctcagaaacttacttgtgatgtgtttgctcaactaacaggattgaaccatcgttttgaaggagcagttttgaaacactgttttcgtggaatctgcaagtggatatttggctagctttgaggatttcgttggaaacgggattacatataaaaaggagacagcagcattctcagaaacttctttgtgatgtctgcattcaagtcacagagttgagcattccctttcatagagcaggttggaaacactctttttgtagtatctggatgaggacatttggagcgctttcaggcgtatggtgaaaaaggaaatatcttcccgtaaaaactagacagaagcattctcagaattttatttgtgatgtgtgccctcaactaacagagttgaacctttcttttgatagagcagttttgaaacactctttttgtaaaatctgcaagaggatatttggatagctttgaggatttcgttgcaaacgggaatggcttcatataaactctagacagaagcattctcagaaacttcgttgggatgtttcgattgaagtcccagtgttgaacattcccttttatagagcaggttggaaacactctttctgcattccctggaagtggacatttggagcgctttcaggacgacggtgaaaatggaaatatcttccaagaaaatctagatagaagcaacgtcagaaacttttctgtgatggatctactcagctaacagagttgaacctttcttttgagagagcagttttgcaacactctttttgtggaatatgcaagtggatattagggcagctttgaggatttcgttggaaacgggaatacatgtaaaaagcagacagcagcattctcagaaacttctttgtgatgtttgcattgaagtcacagagttgaacattccctttcagagagcaggtttgaaacacgccttttgtcatatctggaagtgtccattcggagcgcattcaggcttgtgttgaaaaaggaaatatcctcccataaaaactagacagaagcattctcagaaacttatctgtgatgtatgtactcaactaacagaactaaaccatcgttttgaagggcagttttgaaacactctttttgcggaatctgcaagtggatatttggctagctgggaggatttcgttggaaacgggattacatacaaaaagcagacagcagcattctcagaaacttctttgtgatgtttgcattcaagtcacagagttgaacattccctttcatagagcaggtttgaaacactctttttgtagtatctggatgtggacatttggatcgctttcaggcctatggtgaaaaaggaaatatcttcccatgaaaactagacagaagcattctcagaaacttatttgtgatgtgtgccctcaactgacagtgttgaacctttgttttgatagagcagttctgaaacacactttttgtaaaatctgcaagaggatatttggatagctttgaggatttcgttggaaacgggaatgtcttcatgtaaactctacacagaagcattctcagaaactgctttgggatgtttcaattgaagtcccagtgttgaacattcccattcatagggcaggtttgaagcactctttttgtactatctggaagtggacatttggagcgctttcaggtctacggtgaaaaaggagatatcttccaataaaaactagatagaagcaatgtcagatcttttttcatgatgtatctactcagcaaacagagttgaacctttcttttgagggagcagttttgaaacactatttttgtggaatatgcaagtgggtattaggccagcttggaggatttcgttggaaacggtaatacgtataaaaagcagacagcagcattgtcagaaactactttgtgatgtttgcattcaagtcacagaattgaacactccctttcacagagcaggtttgaaacactctttttgtagtgtctgtaagtgaacatttgggttgctttcaggcctaaggtgaaaaaggaaatatcttcccataaaaactagacagaagcattctcagaaatttatttgtgatgtgcgccctcaactaacagtgttgaacctttcttttgatagagcagttttgaaacactctttttgtaaaatctgcaagaacatatttggacagctttgaggatttcgttggaaacgggattgtcttcatataaactctagacagaagcattctcagaaacttctttgggatgtttcaattgaagtcacagtgttgaacattcccattcatagagcagatttgaaacactctttttgtagtatctggaagtggacatttggagcgctttcaggcctatgttgaaaaaggaaatatcttcccataaaaactagacggaagcattctcagaaacttatctgtgatgtatgtactcaactaacagcaactaaaccatcgttttgaaggagcagttttgaaacactctttgtgcggaatctgcaagtggatatttggctagctgggaggatttcgttggaaacgggattacatacaaaaagcagacagcagcgttgtgagaaacgtctttatgatgtttgcattcaagtcacagagttgaacgttccgtatcatagagcaggttggaaacacgccttttgtcatatctggaagtgtccatttggagtgcattcaggcttgtgttgaaaaaggaaataccttcccatagaaaccagacagaagcattctcagaaacttatttgtgatgtgtgtactcaactaacagaattcaacaatcgttttgaaggagcagttttgaaacactctttttgtggaatctgcaagtgcatatttagctagatttgaggatttcgttggaaacgggattacatataaaaagcaggccgcagcattctcagaaacttctttgtgatgtttgcattcaagtcacagagttgaacattccctttcatagagcaggattgaaaaactctttttgtagaatctggatgtggacatttggagcgctttcaggcctatggtgaaaaaggaaatatcttcccctgaaaactagacagaagcactctcagaaacttaattgtgatgtgtgccctcaactaacagtgttgaacctttcttttcatagagcagttttgaaacacaattttgttaaatctgcaagaggatatttggatagctttgaggatttcgttggaaacgggattgtcttcatataaactctagacagaaagcattctcagaaactgctttgggatgtttcaattgaagtcccagtgttgaacattcccattcatagagcaggtttgaaacactctttttgtactatctggaagtggacatttggagcgctttcaggtctacggtgaaaaaggagatatcttccaataaaaactagatagaagcaatgtcagaacttttttcatgatgtatctactcagcaaacagagttgaacctttcttttgagagagcagttttgaaacactctttttgtggaatatgcaagtgggtattaggccagcttggaggatttcgttggaaacgggaatacgtataaaaagcagacagcagcattgtcagaaactactttgtgatgtttgcattcaagtcacagaactgaacactccctttcacagagcaggtttgaaacactctttttgtagtgtctgtaagtgaacatttggattgctttcaggcctaaggtgaaaaaggaaatatcttcccataaaaactagacagaagcattctcagaaacttgtttgtgatgtgtgccctctactgacagagttgaacctttctttgcaaagagcagttttgaaacactctttttgtagaatctgcaagaggatatttggatagctttgaggatttcttgggaaacgggaatgtcttcagataaactctagacagaagcattctcagaaacttctttgggatgtttcaattgaagtcacagtgttgaacattccctttcacagagcaggtttgaaacactctttttgtagtgtctataagtgaacatttggcgtgctttcaggcgtaacgtgaaaaaggaaatatcttcccataaaaaccagacagaagcattctcagaaacttgttcttgatgtgtcccctctactgacagagttgaacctttctttgcaaagagcagctttgaaacactctttttgtagaatctgcaagaggatatttggatagcttggaggatttcgttggaaacgggtatgtcttcagataaactctagacagaagcattctcagaaacttctttgggatgttgcattcaagtcacagagtagaacattcccattcatagagcagatttgaaacactctttttgtagtatctggaagtggacatttggagcgctttcaggcctatgttgaaaaaggaaatatcttcccataaaaactagacggaagcattctcagaaacttatttgtgatgtgtttgctcaactaacaggattgaaccatcgttttgaaggagcagttttgaaacactgttttcgtggaatctgcaagtggatatttggctagctttgaggatttcgttggaaacgggattacatataaaaaggagacagcagcattctcagaaacttctttgtgatgtctgcattcaagtcacagagttgagcattccctttcatagagaaggttggaaacactctttttgtagtatctggatgaggacatttggagcgctttcaggcgtatggtgaaaaaggaaatatcttcccgtaaaaactagacagaagcattctcagaaatttatttgtgatgtgtgccctcaactaacagagttgaacctttcttttgatagagcagttttgaaacactctttttgtaaaatctgcaagaggatatttggatagctttgaggatttcgttgcaaacgggaatggcttcatataaactctagacagaagcattctcagaaacttcgttgggatgtttcgattgaagtcccagtgttgaacattcccttttatagagcaggttggaaacactctttctgcattccctggaagtggacatttggagcgctttcaggacgacggtgaaaatggaaatatcttccaagaaaatctagatagaagcaatgtcagaaacttttatgtgatggatctactcagctaacagagttgaacctttcttttgagagagcagttttgcaacactctttttgtggaatatgcaagtggatattagggcagctttgaggatttcgttggaaacgggaatacatgtaaaaagcagacagcagcattctcagaaacttctttgtgatgtttgcattgaagtcacagagttgaacattccctttgagagagcaggtttgaaacacgccttttgtcatatctggaagtgtccattcggagcgcattcaggcttgtgttgaaaaaggaaatatcctcccataaaaactagacagaagcattctcagaaacttatctgtgatgtatgtactcaactaacagaactaaaccatcgttttgaaggagcagttttgaaacactctttttgcggaatctgcaagtggatatttggctagcttggaggatttcgttggaaacgggattacatacaaaaagcagagagcagcattctcagaaacttatttgtgatgtgtgccctcaactgacagtgttgaacctttgttttgatagagcagttctgaaacacactttttgtaaaatctgcaagaggatatttggatagctttgaggatttcgttggaaacgggaatgtcttcatgtaaactctggacagaagcattctcagaaactgctttgggatgtttcaattgaagtcccagtgttgaacattcccattcatagagcaggtttgaaacactctttttgtactatctggaagtggacatttggagcgctttcaggtctacggtgaaaaaggagatatcttccaataaaaactagatagaagcaatgtcagaacttttttcatgatgtatctactcagcaaacagagttgaacctttcttttgagagagcagttttgaaacactctttttgtggaatatgcaagtgggtattaggccagcttggaggatttcgttggaaacgggaatacgtataaaaagcagacagcagcattgtcagaaactactttgtgatgtttgcattcaagtcacagaattgaacactccctttcacagagcaggtttgaaacactctttttgtagtgtctgtaagtgaacatatggattgctttcaggcctaaggtgaaaaaggaaatatcttcccataaaaactagacagaagcattctcagaaacttgtttctgatgtgtgccctctactgacagagttgaacctttctttgcaaagagcagttttgaaacactctttttgtagaatctgcaagaggatatttggatagctttgaggatttcttgggaaacgggaatgtcttcagataaactctagacagaagcattctcagaaacttctttgggatgtttcaattgaagtcacagtgttgaacattccctttcacagagcaggtttgaaacactctttttgtagtgtctataagtgaacatttggcgtgctttcaggcctaacgtgaaaaaggaaatatcttcccataaaaactagacagaagcattctcagaaacttgttcttgatgtgtcccctctactgacagagttgaacctttctttgcaaagagcagctttgaaacactctttttgtagaatctgccagaggatatttggatagctttgaggatttcgttggaaacgggtatgtcttcagataaactctagacagaagcattctcagaaacttctttgggatgttgcattcaagtcacagagtagaacattcccattcatagagcagatttgaaacactctttttgtagtatctggaagtggacatttggagcgctttcaggcctatgttgaaaaaggaaatatcttcccataaaaactagacggaagcattctcagaaacttatttgtgatgtgtttgctcaactaacaggattgaaccatcgttttgaaggagcagttttgaaacactgttttcgtggaatctgcaagtggatatttggctagctttgaggatttcgttggaaacgggattacatataaaaaggagacagcagcattctcagaaacttctttgtgatgtctgcattcaattcacagagttgagcattccctttcatagagcaggttggaaacactctttttgtagtatctggatgaggacatttggagcgctttcaggcgtatggtgaaaaaggaaatatcttcccgtaaaaactagacagaagcattctcagaagtttatttgtgatgtgtgccctcaactaacagagttgaacctttcttttgatagagcagttttgaaacactctttttgtaaaatctgcaagaggatatttggatagctttgaggatttcgttgcaaacgggaatggcttcatataaactctagacagaagcattctcagaaacttcgttgggatgtttcgattgaagtcccagtgttgaacattcccttttatagagcaggttggaaacactctttctgcattccctggaagtggacatttggagcgctttctggacgacggtgaaaatggaaatatcttccaagaaaatctagatagaagcaatgtcagaaacttttatgtgatggatctactcagctaacagagttgaacctttcttttgagagagcagttttgcaacactccttttgtggaatatgcaagtggatattagggcagctttgaggatttcgttggaaacgggaatacatgtaaaaagcagacagcagcattctcagaaacttctttgtgatgtttgcattgaagtcacagagttgaacattccctttgagagagcaggtttgaaacacgccttttgtcatatctggaagtgtccattcggagcgcattcaggcttgtgttgaaaaaggaaatatcctcccataaaaactagacagaagcattctcagaaacttatttgtgatgtatgtactcaactaacagaactaaaccatcgttttgaaggagcagttttgaaacactctttttgcggaatctgcaagtggatatttggctagctgggaggatttcgttggaaacgggattacatacaaaaagcagagagcagcattctcagaaacttctttgtgatgtttgcattcaagtcacagagttgaacattccctttcatagagcaggtttgaaacactctttttgtagtatctggatgtggacatttggatcgctttcaggcctacggtgaaaaaggaaatatcttcccatgaaaactagacagaagcattctcagaaacttatttgtgatgtgtgccctcaactgacagtgttgaacctttgttttgatagagcagttctgaaacacactttttgtaaaatctgcaagaggatatttggatagctttgaggatttcgttggaaacgggaatgacttcatgtaaactctagacagaagcattctcagaaactgctttgggatgtttcaattgaagtcccagtgttgaacattccctttcataggagcaggtttgaaacactctttttgtactatctggaagtggacatttggagcgctttcaggtctacggtgaaaaaggagatatcttccaataaaaactagatagaagcaatgtcagaacttttttcatgatgtatctactcagcaaacagagttgaacctttcttttgagagagcagttttgaaacactctttttgtggaatatgcaagtgggtattaggccagcttggaggatttcgttggaaacgggaatacgtataaaaagcagacagcagcattgtcagaaactactttgtgatgtttgcattcaagtcacagaattgaacactccctttcacagagcaggtttgaaacactctttttgtagtgtctgtaagtgaacatttggattgctttcaggcctaaggtgaaaaaggaaatatcttcccataaaaactagacagaagcattctcagaaacttgtttgtgatgtgtgccctctactgacagagttgaacctttctttgcaaagagcagttttgaaacactctttttgtagaatctgcaagaggatatttggatagctttgaggatttcttgggaaacgggaatgtcttcagataaactctagacagaagcattctcagaaacttctttgggatgtttcaattgaagtcacagtgttgaacattccctttcacagagcaggtttgaaacactctttttgtagtgtctataagtgaacatttggcgtgctttcaggcctaacgtgaaaaaggaaatatcttcccataaaaactagacagaagcattctcagaaacttgtttgtgatgtgtgccctctactgacagagttgaacctttccttgcaaagagcagctttgaaacactctttttgtagaatctgcaagaggctatttggatagctttgaggatttcgttggaaacggttatgtcttcagataaactctagacagaagcattctcagaaacttctttgggatgtttcaattgaagtcacagtgttgaacattccctttcacagagcaggtttgaaacactctttttgtagtgtctataagtgaacatttggcgtgctttcaggcctaacgtgaaaaaggaaatatcttcccataaaaactagacagaagcattctcagaaacttgttcatgatgtgtgccctctactgacagagttgaacctttctttgcaaagagcagctttgaaacactctttttgtagaatctgcaagaggatatttggatagctttgaggatttcgttggaaacgggtatgtcttcagataaactctagacagaagcattctcagaaacttctttgggatgttgcattcaagtcacagagtagaacattcccattcatagagcagatttgaaacactctttttgtagtatctggaagtggacatttggagcgctttcaggcctatgttgaaaaaggaaatatcttcccataaaaactagacggaagcattctcagaaacttacttgtgatgtgtttgctcaactaacagaattgaaccatcgttttgaaggagcagttttgaaacactgttttcgtggaatctgcaagtggatatttggctagctttgaggatttcgttggaaacgggattacatataaaaaggagacagcagcattctcagaaacttctttgtgatgtctgcattcaagtcacagagttgagcattccctttcatagagcaggttggaaacactctttttgtagtatctggatgaggacatttggagcgctttcaggcgtatggtgaaaaaggaaatatcttcccgtaaaaactagacagaagcattctcagaagtttatttgtgatgtgtgccctcaactaacagagttgaacctttcttttgatagagcagttttgaaacactctttttgtaaaatctgcaagaggatatttggatagctttgaggatttcgttgcaaacgggaatggcttcatataaactctagacagaagcattctcagaaacttcgttgggatgtttcgattgaagtcccagtgttgaacattcccttttatagagcaggttggaaacactctttctgcattccctggaagtggacatttggagcgctttcaggacgacggtgaaaatggaaatatcttccaagaaaatctagatagaagcaatgtcagaaacttttatgtgatggatctactcagctaacagagttgaacctttcttttgagagagcagttttgcaacactctttttgtagaatatgcaagtggatattagggcagctttgaggatttcgttggaaacgggaatacatgtaaaaagcagacagcagcattctcagaaacttctttgtgatgtttgcattgaagtcacagagttgaacattccctttgagagagcaggtttgaaacacgccttttgtcatatctggaagtgtccattcggagcgcattcaggcttgtgttgaaaaaggaaatatcctcccataaaaactagacagaagcattctcagaaacttatctgtgatgtatgtactcaactaacagaactaaaccatcgttttgaaggagcagttttgaaacactctttttgcggaatctgcaagtggatatttggctagctgggaggatttcgttggaaacgggattacatacaaaaagcagagagcagcattctcagaaacttctttgtgatgtttgcattcaagtcacagagttgaacattccctttcatagagcaggtttgaaacactctttttgtagtatctggatgtggacatttggatcgctttcaggcctatggtgaaaaaggaaatatcttcccatgaaaactagacagaagcattctcagaaacttatttgtgatgtgtgccctcaactgacagtgttgaacctttgttttgatagagcagttctgaaacacactttttgtaaaatctgcaagaggatatttggatagctttgaggatttcgttggaaacgggaatgtcttcatgtaaacttctagacagaagcattctcagaaactgctttgggatgtttcaattgaagtcccagtgttgaacattccctttcatagagcaggtttgaaacactctttttgtactatctggaagtggacatttggagcgctttcaggtctaaggtgaaaaaggagatatcttccaataaaaactagatagaagcaatgtcagaacttttttcatgatgtatctactcagcaaacagagttgaacctttcttttgagagagcagttttgaaacactctttttgtggaatatgcaagtgggtattaggccagcttggaggatttcgttggaaacgggaatacgtataaaaagcagacagcagcattgtcagaaactactttgtgatgtttgcattcaagtcacagaattgaacactccctttcacagagcaggtttgaaacacgctttttgtagtgtctgtaagtgaacatttggattgctttcaggcctaaggtgaaaaaggaaatatcttcccataaaaactagacagaagcattctcagaaacttgtttgtgatgtgtgccctctactgacagagttgaacctttctttgcaaagagcagttttgaaacactctttttgtagaatctgcaagaggatatttggatagctttgaggatttcttgggaaacgggaatgtcttcagataaactctagacagaagcattctcagaaacttctttgggatgtttcaattgaagtcacagtgttgaacattccctttcacagaacaggtttgaaacactctttttgtagtgtctataagtgaacatttggcgtgctttcaggcgtaacgtgaaaaaggaaatatcttcccataaaaactagacagaagcattctcagaaacttgttcttgatgtgtcccctctactgacagagttgaacctttctttgcaaagagcagctttgaaacactctttttgtagaatctgcaagaggatatttggatagcttggaggatttcgttggaaacgggtatgtcttcagataaactctagacagaagcattctcagaaacttctttgggatgttgcattcaagtcacagagtagaacattcccattcatagagcagatttgaaacactctttttgtagtatctggaagtggacatttggagcgctttcaggcctatgttgaaaaaggaaatatcttcccataaaaactagacggaagcattctcagaaacttatttgtgatgtgtttgctcaactaacaggattgaaccatcgttttgaaggagcagttttgaaacactgttttcatggaatctgcaagtggatatttggctagctttgaggatttcgttggaaacgggattacatataaaaaggagacagcaagcattctcagaaacttctttgtgatgtttgcattcaagtcacagagttgaacattccctttcatagagcaggtttgaaacactctttttgtagtatctggatgtggacatttggatcgctttcaggcctatggtgaaaaaggaaatatcttcccatgaaaactagacagaagcattctcagaaacttatttgtgatgtgtgccctcaactgacagtgttgaacctttgttttgatagagcagttctgaaacacactttttgtaaaatctgcaagaggatatttggatagctttgaggatttcgttggaaacgggaatgtcttcatgtaaactctacacagaagcattctcagaaactgctttgggatgtttcaattgaagtcccagtgttgaacattcccattcatagagcaggtttgaaacactctttttgtactatctggaagtggacatttggagcgctttcaggtctacggtgaaaaaggagatatcttccaataaaaactagatagaagcaatgtcagaacttttttcatgatgtatctactcagctaacagagttgaacctttcttttgagagagcagttttgaaacactctttttgtggaatatgcaagtgggtattaggccagcttggaggatttcgttggaaacgggaatacgtataaaaagcagacagcagcattgtcagaaactactttgtgatgtttgcattcaagtcacagaactgaacactccctttcacagagcaggtttgaaacactctttttgtagtgtctgtaagtgaacatatggattgctttcaggcctaaggtgaaaaaggaaatatcttcccataaaaactagacagaagcattctcagaaacttgtttgtgatgtgtgccctctactgacagagttgaacctttctttgcaaagagcagttttgaaacactctttttgtagaatctgcaagaggatatttggatagctttgaagatttcttgggaaacgggaatgtcttcagataaactctagacagaagcattctcagaaacttctttgggatgtttcaattgaagtcacagtgttgaacattccctttcacagagcaggtttgaaacactctttttgtagtgtgtataagtgaacatttcgcgtgctttcaggcctaacgtgaaaaaggaaatatcttcccataaaaactagacagaagcattctcagaaacttgttcatgatgtgtgccctctactgacagagttgaacctttctttgcaaagagcagctttgaaacactctttttgtagaatctgcaagaggatatttggatagcttggaggatttcgttggaaacgggtatgtcttcagataaactctagacagaagcattctcagaaacttctttgggatgttgcattcaagtcacagagtagaacattcccattcatagagcagatttgaaacactctttttgtagtatctggaagtggacatttggagcgctttcaggcctatgttgaaaaaggaaatatcttcccataaaaactagacggaagcattctcagaaacttacttgtgatgtgtttgctcaactaacagaattgaaccatcgttttgaaggagcagttttgaaacactgttttcgtggaatctgcaagtggatatttggctagctttgaggatttcgttggaaacgggattacatataaaaaggagacagcagcattctcagaaacttctttgtgctgtctgcattcaagtcacagagttgagcattccctttcatagagcaggttggaaacactctttttgtagtatctggatgaggacatttggagcgctttcaggcgtatggtgaaaaaggaaatatcttcccgtaaaaactagacagaagcattctcagaaatttatttgtgatgtgtgccctcaactaacagagttgaacctttcttttgatagagcagttttgaaacactctttttgtaaaatctgcaagaggatatttggatagctttgaggatttcattgcaaacgggaatggcttcatataaactctagacagaagcattctcagaaacttcgttgggatgtttcgattgaagtcccagtgttgaacattcccttttatagagcaggttggaaacactctttctgcattccctggaagtggacctttggagcgctttcaggacgacggtgaaaatggaaatatcttccaataaaatctagatagaagcaacgtcagaaacttttatgtgatggatctactcagctaacagagttgaacctttcttttgagagagcagttttgcaacactctttttgtggaatatgcaagtggatattagggcagctttgaggatttcgttggaaacgggaatacatgtaaaaagcagacagcagcattctcagaaacttctttgtgatgtttgcattgaagtcacagagttgaacattccctttgagagagcaggtttgaaacacgccttttgtcatatctggaagtgtccattcggagcgcattcaggcttgtgttgaaaaaggaaatatcctcccataaaaactagacagaagcattctcagaaacttatctgtgatgtatgtactcaactaacagaactaaaccatcgttttgaaggagcagttttgaaacactctttttgcggaatctgcaagtggatatttggctagctgggaggatttcgttggaaacgggattacatacaaaaagcagacagcagcattctcagaaacttctttgtgatgtttgcattcaagtcacagagttgaacattccctttcatagagcaggtttgaaacactctttttgtagtatctggatgtggacatttggatcgctttcaggcctatggtgaaaaaggaaatatcttcccatgaaaactagacagaagcattctcagaaacttatttgtgatgtgtgccctcaactgacagtgttgaacctttgttttgatagagcagttctgaaacacactttttgtaaaatctgcaagaggatatttggatagctttgaggatttcgttggaaacgggaatgtcttcatgtaaactctggacagaagcattctcagaaactgctttgggatgtttcaattgaagtcccagtgttgaacattccctttcatagagcaggtttgaaacactctttttgtagtatctggaagtggacatttggagcgctttcaggtctacggtgaaaaaggagatatcttccaataaaaactagatagaagcaatgtcagaacttttttcatgatgtatctactcagcaaacagagttgaacctttcttttgagagagcagttttgaaacactctttttgtggaatatgcaagtgggtattaggccagcttggaggatttcgttggaaacgggaatacgtataaaaagcagacagcagcattgtcagaaactactttgtgatgtttgcattcaagtcacagaattgaacactccctttcacagagcaggttggaaacactctttttgtagtgtctgtaagtgaacatttggattgctttcaggcctaaggtgaaaaaggaaatatcttcccataaaaactagacagataagcattctcagaaacttgtttgtgatgtgtgccctctactgacagagttgaacctttctttgcaaagagcagttttgaaacactctttttgtagaatctgcaagaggatatttggatagctttgaggatttcttgggaaacgggaatgtcttcagataaactctagacagaagcattctcagaaacttctttgggatgtttcaattgaagtcacagtgttgaacattccctttcacagagcaggtttgaaacactctttttgtagtgtctataagtgaacatttggcgtgctttcaggcctaacgtgaaaaaggaaatatcttcccataaaaactagacagaagcattctcagaaacttgttcgtgatgtgtgccctctactgacagagttgaacctttctttgcaaagagcagctttgaaacactctttttgtagaatctgcaagaggatatttggatagctttgaggatttcgttggaaacgggtatgtcttcagataaactctagacagaagcattctcagaaacttctttgggatgttgcattcaagtcacagagtagaacattcccattcatacaccagatttgaaacactctttttgtagtatctggaagtggacatttggagcgctttcaggcatatgttgaaaaaggaaatatcttcccataaaaactagacagaagcattctcagaaacttgtttgtgatgtgtgccctctactgacagatttgaacctttctttgcaaagagcagctttgaaacactctttttgtagaatctgcaagaggatatttggatagcttttgggatttcgttggaaacgggtatgtcttcagataaactctagacagaagcattctcagaaacttctttgggatgtttcaattgaagtcacagtgttgaacattccctttcacagagcaggtttgaaacactctttttgtagtgtctataagtgaacatttggcgtgctttcaggcctaacgtgaaaaaggaaatatcttcccataaaaactagacagaagcattctcagaaacttgttcgtgatgtgtgccctctactgacagagttgaacctttctttgcaaagagcagctttgaaacactctttttgtagaatctgcaagaggatatttggatagctttgaggatttcgttggaaacgggtatgtcttcagataaactctagacagaagcattctcagaaacttctttgagatattgcattcaagtcacagagtagaacattcccattcatagagcagatttgaaacactctttttgtagtatctggaagtggacatttggagcgctttcaggcctatgttgaaaaaggaaatatcttcccataaaaactagacggaagcattctcagaaacttacttgtgatgtgtttgctcaactaacagaattgaaccatcgttttgaaggagcagttttgaaacactgttttcgtggaatctgcaagtggatatttggctagctttgaggatttcgttggaaacgggattacatataaaaaggagacagcagcattctcagaaacttctttgtgatgtttgcattcaagtcacagagttgaacattccctttcatagagcaggttggaaacactctttttgtagtatctggatgtggacatttagatggctttcaggcctatggtgaaaaaggaaatatcttcccatgaaaactagacagaagcattctcagaaacttatttgtgatgtgtgccctcaactgacagtgttgaacctttgttttgatagagcagttctgaaacacactttttgtaaaatctgcaagaggatatttggatagctttgaggatttcgttggaaacgggaatgtcttcatgtaaactctagacagaagcattctcagaaactgctttgggatgtttcaattgaagtcccagtgttgaacattcccattcatagagcaggtttgaaacactctttttgtactatctggaagtggacatttggagcgctttcaggtctacggtgaaaaaggagatatcttccaataaaaactagatagaagcaatgtcagaacttttttcatgatgtatctactcagcaaacagagttgaacctttcttttgagagagcagttttgaaacactctttttgtggaatatgcaagtgggtattaggccagcttggaggatttcgttggaaacgggaatacgtataaaaagcagacagcagcattgtcagaaactactttgtgatgtttgcattcaagtcacagaattgaacactccctttcacagagcaggtttgaaacactctttttgtagtgtctgtaagtgaacatttggattgctttcaggcctaaggtgaaaaaggaaatatcttcccataaaaactagacagaagcattctcagaaacttgtttgtgatgtgtgccctctactgacagagttgaacctttctttgcaaagagcagttttgaaacactctttttgtagaatctgcaagaggatatttggatagctttgaggatttcttgggaaacgggaatgtcttcagataaactctagacagaagcattctcagaaacttctttgggatgtttcaattgaagtcacagtgttgaacattccctttcacagagcaggtttgaaacactctttttgtagtgtctataagtgaacatttggcgtgctttcaggcctaacgtgaaaaaggaaatatcttcccataaaaactagacagaagcattctcagaaacttgttcttgatgtgtcccctctactgacagagttgaacctttctttgcaaagagcagctttgaaacactctttttgtagaatctgcaagaggatatttggatagcttggaggatttcgttggaaacgggtatgtcttcagataaactctagacagaagcattctcagaaacttctttgggattttgcattcaagtcacagagtagaacattcccattcatagagcagatttgaaacactctttttgtagtatctggaagtggacatttggagcgctttcaggcctatgttgaaaaaggaaatatcttcccataaaaactagacggaagcattctcagaaacttatttgtgatgtgtttgctcaactaacaggattgaaccatcgttttgaaggagcagttttgaaacactgttttcgtggaatctgcaagtggatatttggctagctttgaggatttcgttggaaacgggattacatataaaaaggagacagcagcattctcagaaacttctttgtgatgtctgcattcaattcacagagttgagcattccctttcatagagcaggttggaaacactctttttgtagtatctggatgaggacatttggagcgctttcaggcgtatggtgaaaaaggaaatatcttcccgtaaaaactagacagaagcattctcagaaatttatttgtgatgtgtgccctcaactaacagagttgaacctttcttttgatagagcagttttgaaacactctttttgtaaaatctgcaagaggatatttggatagctttgaggatttcattgcaaacgggaatggcttcatataaactctagacagaagcattctcagaaacttcgttgggatgtttcgattgaagtcccagtgttgaacattcccttttatagagcaggttggaaacactctttctgcattccctggaagtggacatttggagcgctttcaggacgacggtgaaaatggaaatatcttccaagaaaatctagatagaagcaatgtcagaaacttttatgtgatggatctactcagctaacagagttgaacctttcttttgagagagcagttttgcaacactctttttgtggaatatgcaagtggatattagggcagctttgaggatttcgttggaaacgggaatacatgtaaaaagcagacagcagcattctcagaaacttctttgtgatgtttgcattgaagtcacagagttgaacattccctttgagagagcaggtttgaaacacgccttttgtcatatctggaagtgtccattcggagcgcattcaggcttgtgttgaaaaaggaaatatcctcccataaaaactagacagaagcattctcagaaacttatctgtgatgtatgtactcaactaacagaactaaaccatcgttttgaaggagcagttttgaaacactctttttgcggaatctgcaagtggatatttggctagctgggaggatttcgttggaaacgggattacatacaaaaagcagagagcagcattctcagaaacttctttgtgatgtttgcattcaagtcacagagttgaacattccctttcatagagcaggtttgaaacactctttttgtagtatctggatgtggacatttggatcgctttcaggcctacggtgaaaaaggaaatatcttcccatgaaaactagacagaagcattctcagaagtttatttctgatgtgtgccctcaactaacagagttgaacctttcttttgatagagcagttttgaaacactctttttgtaaaatctgcaagaggatattttgatagctttgaggatttcgttgcaaacgggaatggcttcatataaactctagacagaagcattctcagaaacttcgttgggatgtttcgattgaagtcccagtgttgaacattcccattcatagagcaggtttgaaacactctttttgtactatctggaagtggacatttggagcgctttcaggtctacggtgaaaaaggagatatcttccaataaaaactagatagaagcaatgtcagaacttttttcatgatgtatctactcagcaaacagagttgaacctttcttttgagagagcagttttgaaacactctttttgtggaatatgcaagtgggtattaggccagcttggaggatttcgttggaaacgggaatacgtataaaaagcagacagcagcattgtcagaaactactttgtgatgtttgcattcaagtcacagaattgaacactccctttcacagagcaggtttgaaacactctttttgtagtgtctgtaagtgaacatttggattgctttcaggcctaaggtgaaaaaggaaatatcttcccataaaaactagacagaagcattctcagaaactagtttgtgatgtgtgccctctactgacagagttgaacctttctttgcaaagagcagttttgaaacactctttttgtagaatctgcaagaggatatttggatagctttgaggatttcttgggaaacgggaatgtcttcagataaactctagacagaagcattctcagaaacttctttgggatgtttcaattgaagtcacagtgttgaacattccctttcacagagcaggtttgaaacactctttttgtagtgtctataagtgaacatttggcgtgctttcaggcctaacgtgaaaaaggaaatatcttcccataaaaactagacagaagcattctcagaaacttgttcgtgatgtgttccctctactgacagagttgaacctttctttgcaaagagcagctttgaaacactctttttgtagaatctgcaagaggatatttggatagctttgaggatttcgttggaaacgggtatgtcttcagataaactctagacagaagcattctcagaaacttctttgggatgttgcattcaagtcacagagtagaacattcccattcatagagcagatttgaaacactctttttgtagtatctggaagtggacatttggagcgctttcaagcctatgttgaaaaaggatatatcttcccataaaaactagacggaagcattctcagaaacttatttgtgatgtgtttgctcaactaacaggattgaaccaccgttttgaaggagcagttttgaaacactgttttcgtggaatctgcaagtggatatttggctagctttgaggatttcgttggaaacgggattacatatacaaaggagacagcagcattcccagaaacttctttgtgatgtctgcattcaattcacagagttgagcattccctttcatagagcaggttggaaacactctttttgtagtatctggatgaggacatttggagcgctttcaggcgtatggtgaaaaaggaaatatcttcccgtaaaaactagacagaagcattctcagaaatttatttgtgatgtgtgccctcaactaacagagttgaacctttcttttgatagagcagttttgaaacactctttttgtaaaatctgcaagaggatattgggatagctttgaggatttcgttgcaaacgggaatggcttcatataaactctagacagaagcattctcagaaacttcgttgggatgtttcgattgaagtcccagtgttgaacattcccttttatagagcaggttggaaacactctttctgcattccctggaagtggacatttggagcgctttcaggacgacggtgaaaatggaaatatcttccaagaaaatctagatagaagcaacgtcagaaacttttctgtgatggatctactcagctaacagagttgaacctttcttttgagagagcagttttgcaacactctttttgtggaatatgcaagtggatattagggcagctttgaggatttcgttggaaacgggaatacatgtaaaaagcagacagcagcattctcagaaacttctttgtgatgtttgcattgaagtcacagagttgaacattccctttgagagagcaggtttgaaacacgccttttgtcatatctggaagtgtccattcggagcgcattcaggcttgtgttgaaaaaggaaatatcctcccataaaaactagacagaagcattctcagaaacttatctgtgatgtatgtactcaactaacagaactaaaccatcgttttgaaggagcagttttgaaacactctttttgcggaatctgcaagtggatatttggctagctgggaggatttcgttggaaacgggattacatacaaaaagcagacagcagcattctcagaaacttctttgtgatgtttgcattcaagtcacagagttgaacattccctttcatagagcaggtttgaaacactctttttgtagtatctggatgtggacatttggatcgctttcaggcctatggtgaaaaaggaaatatcttcccatgaaaactagacagaagcattctcagaaacttatttgtgatgtgtgccctcaactgacagtgttgaacctttgttttgatagagcagttctgaaacacactttttgtaaaatctgcaagaggatatttggatagctttgaggatttcgttggaaacgggaatgtcttcatgtaaactctagacagaagcattctcagaaactgctttgggatgtttcaattgaagtcccagtgttgaacattccctttcatagagcaggtttgaaacactctttttgtactatctggaagtggacattcggagcgctttcaggtctacggtgaaaaaggagatatcttccaataacaactagatagaagcaatgtcagaacttttttcatgatgtatctactcagcaaacagagttgaacctttcttttgagagagcagttttgaaacactctttttgtggaatatgcaagtgggtattaggccagcttggaggatttcgttggaaacgggaatacgtataaaaagcagacagcagcattgtcagaaactactttgtgatgtttgcattcaagtcacagaattgaacactccctttcacagagcaggtttgaaacactctttttgtagtgtctgtaagtgaacatttggattgctttcaggcctaaggtgaaaaaggaaatatcttcccataaaaactagacagaagcattctcagaaacttgtttgtgatgtgtgccctctactgacagagttgaacctttctttgcaaagagcagttttgaaacactctttttgtagaatctgcaagaggatatttggatagctttgaggatttcttgggaaacgggaatgtcttcagataaactctagacagaagcattctcagaaacttctttgggatgtttcaattgaagtcacagtgttgaacattccctttcacagagcaggtttgaaacactctttttgtagtgtctataagtgaacatttggcgtgctttcaggcctaacgtgaaaaaggaaatatcttcccataaaaactagacagaagcattctcagaaacttgttcgtgatgtgtgccctctactgacagagttgaacctttctttgcaaagagcagctttgaaacacactttttgtagaatctgcaagaggatatttggatagcttggaggatttcgttggaaacgggtatgtcttcagataaactctagacagaagcattctcagaaacttctttgggatgttgcattcaagtcacagagtagaacattcccattcatagagcagatttgaaacactctttttgtagtatctggaagtggacatttggagcgctttcaggcctatgttgaaaaaggaaatatcttcccataaaaactagacggaagcattctcagaaacttaattgtgatgtgtttgctcaactaacaggattgaaccatcgttttgaaggagcagttttgaaacactgttttcgtggaatctgcaagtggatatttggctagctttgaggatttcgttggaaacgggattacatataaaaaggagacagcagcattctcagaaacttctttgtgatgtctgcattcaattcacagagttgagcattccctttcatagagcaggttggaaacactctttttgtagtatctggatgaggacatttggagcgctttcaggcgtatggtgaaaaaggaaatatcttcccgtaaaaactagacagaagcattctcagaagtttatttgtgatgtgtgccctcaactaacagagttgaacctttcttttgatagagcagttttgaaacactctttttgtaaaatctgcaagaggatatttggatagctttgaggatttcgttgcaaacgggaatggcttcatataaactctagacagaagcattctcagaaacttcgttgggatgtttcgattgaagtcccagtgttgaacattcccttttatagagcaggttggaaacactctttctgcattccctggaagtggacatttggagcgctttcaggacgacggtgaaaatggaaatatcttccaagcaaaatctagatagaagcaatgtcagaaacttttatgtgatggatctactcagctaacagagttgaacctttcttttgagagagcagttttgcaacactctttttgtggaatatgcaagtggatattagggcagctttgaggatttcgttggaaacgggaatacatgtaaaaagcagacagcagcattctcagaaacttctttgtgatgtttgcattgaagtcacagagttgaacattccctttgagagagcaggtttgaaacacgccttttgtcatatctggaagtgtccattcggagcgcattcaggcttgtgttgaaaaaggaaatatcctcccataaaaactagacagaagcattctcagaaacttatctgtgatgtatgtactcaactaacagaactaaaccatcgttttgaaggagcagttttgaaacactctttttgcggaatctgcaagtggatatttggctagctgggaggatttcgttggaaacgggattacatacaaaaagcagagagcagcattctcagaaacttctttgtgatgtttgcattgaagtcacagagttgaacattccctttcatagagcaggtttgaaacactctttttgtagtatctggatgtggacatttggatcgctttcaggcctatggtgaaaaaggaaatatcttcccatgaaaactagacagaagcattctcagaaacttatttgtgatgtgtgccctcaactgacagtgttgaacctttgttttgatagagcagttctgaaacacactttttgtaaaatctgcaagaggatatttggatagctttgaggatttcgttggaaacgggaatgtcttcatgtaaactctagacagaagcattctcagaaactgctttgggatgtttcaattgaagtcccagtgttgaacattccctttcatagagcaggtttgaaacactctttttgtactatctggaagtggacatttggagcgctttcaggtctacggtgaaaaaggagatatcttccaataaaaactagatagaagcaatgtcagaacttttgtcatgatgtatctactcagcaaacagagttgaacctttcttttgagagagcagttttgaaacactctttttgtggaatatgcaagtgggtattaggccagcttggaggatttcgttggaaacgggaatacgtataaaaagcagacagcagcattgtcagaaactactttgtgatgtttgcattcaagtcacagaattgaacactccctttcacagagcaggtttgaaacactctttttgtagtgtctgtaagtgaacatttggattgctttcaggcctatgtgaaaaaggaaatatcttcccataaaaactagacagaagcattctcagaaacttgtttgtgatgtgtgccctctactgacagagttgaacctttctttgcaaagagcagttttgaaacactctttttgtagaatctgcaagaggatatttggatagctttgaggatttcttgggaaacgggaatgtcttcagataaactctagacagaaagcattctcagaaacttctttgggatgtttcaattgaagtcacagtgttgaacattccctttcacagagcaggtttgaaacactctttttgtagtgtctataagtgaacatttggcgtgctttcaggcctaacgtgaaaaaggaaatatcttcccataaaaactagacagagcattctcagaaacttgtttgtgatgtgtgccctctactgacagagttgaacctttctttgcaaagagcagctttgaaacactctttttgtagaatctgcaagaggatatgtggatagctttgaggatttcgttggaaacgggtatgtcttcagataaactctagacagaagcattctcagaaacttctttgggatgttgcattcaagtcacagagtagaacattcccattcatagagcagatttgaaacactctttttgtagtatctggaagtggacatttggagcgctttcaggcctatgttgaaaaaggaaatatcttcccataaaaactagacggaagcattctcagaaacttacttgtgatgtgtttgctcaactaacagaattgaaccatcgttttgaaggagcagttttgaaacactgttttcgtggaatctgcaagtggatatttggctagctttgaggatttcgttggaaacgggattacatataaaaaggagacagcagcattctcagaaacttctttgtgatgtctgcattcaagtcacagagttgagcattccctttcatagagcaggttggaaacactctttttgtagtatctggatgaggacatttggagcgctttcaggcgtatcgtgaaaaaggaaatatcttcccgtaaaaactagacagaagcattctcagaagtttatttgtgatgtgtgccctcaactaacagagttgaacctttcttttgatagagcagttttgaaacactctttttgtaaaatctgcaagaggatatttggatagctttgaggatttcgttgcaaacgggaatggcttcatataaactctagacagaagcattctcagaaacttcgttgggatgtttcgattgaagtcccagtgttgaacattcccttttatagagcaggttggaaacactctttctgcattccctggaagtggacatttggagcgctttcaggacggcggtgaaaatggaaatatcttccaagaaaatctagatagaagcaatgtcagaaacttttatgtgatggatctactcagctaacagagttgaacctttcttttgagagagcagttttgcaacactctttttgtggaatatgcaagtggatattagggcagctttgaggatttcgttggaaacgggaatacatgtaaaaagcagacagcagcattctcagaaacttctttgtgatgtttgcattgaagtcacagagttgaacattccctttgagagagcaggtttgaaacacgccttttgtcatatctggaagtgtccattcggagcgcattcaggcttgtgttgaaaaaggaaatatcctcccataaaaactagacagaagcattctcagaaacttatctgtgatgtatgtactcaactaacagaactaaaccatcgttttgaagggcagtttagaaacactctttttgcggaatctgcaagtggatatttggctagctgggaggatttcgttggaaacgggattacatacaaaaagcagacagcagcattctcagaaacttctttgtgatgtttgcattcaagtcacagagttgaacattccctttcatagagcaggtttgaaacactctttttgtagtatctggatgtggacatttggatcgctttcaggcctatggtgaaaaaggaaatatcttcccatgaaaactagacagaagcattctcagaaacttatttgtgatgtgtgccctcaactgacagtgttgaacctttgttttgatagagcagttctgaaacacactttttgtaaaatctgcaagaggatatttggatagctttgaggatttcgttggaaacgggaatgtcttcatgtaaactctacacagaagcattctcagaaactgctttgggatgtttcaattgaagtcccagtgttgaacattcccattcatagagcaggtttgaaacactctttttgtactatctggaagtggacatttggagcgctttcaggtctacggtgaaaaaggagatatcttccaataaaaactagatagaagcaatgtcagaacttttttcatgatgtatctactcagctaacagagttgaatctttcttttgagagagcagttttgaaacactctttttgtggaatatgcaagtgggtattaggccagcttggaggatttcgttggaaacgggaatacgtataaaaagcagacagcagcattgtcaggaaactactttgtgatgtttgcattcaagtcacagaattgaacactccctttcacagagcaggtttgaaacactctttttgtagtgtctgtaagtgaacatatggattgctttcaggcctaaggtgaaaaaggaaatatcttcccataaaaactagacagaagcattctcagaaacttgtttgtgatgtgtgccctctactgacagagttgaacctttctttgcaaagaccagttttgaaacactctttttgtagaatctgcaagaggatatttggatagctttgaggatttcttgggaaacgggaatgtcttcagataaactctagacagaagcattctcagaaacttctttgggatgtttcaattgaagtcacagtgttgaacattccctttcacagagcaggtttgaaacactctttttgtagtgtctataagtgaacatttggcgtgctttcaggcctaacgtgaaaaaggaaatatcttcccataaaaactagacagaagcattctcagaaacttgttcgtgatgtgtgccctctactgacagagttgaacctttctttgcaaagagcagctttgaaacacactttttgtagaatctgcaagaggatatttggatagctttgaggatttcgttggaaacgggtatgtcttcagataaactctagacagaagcattctcagaaacttctttgggatgttgcattcaagtcacagagtagaacattcccattcatagagcagatttgaaacactctttttgtagtatctggaagtggacatttggagcgctttcaggcctatgttgaaaaaggaaatatcttcccataaaaactagacggaagcattctcagaaacttatttgtgatgtgtttgctcaactaacaggattgaaccatcgttttgaaggagcagttttgaaacactgttttcgtggaatctgcaagtggatatttggctagatttgaggatttcgttggaaacgggattacatataaaaaggagacagcagcattatcagaaacttctttgtgatgtttgcattcaagtcacagagttgaacattccctttcatagagcaggtttgaaacactctttttgtagtatctggatgtggacatttggagcgctttcaggcctatggtgaaaaaggaaatatcttcccctaaaaactagacagaagcattctcagaagtttatttctgatgtgtgccctcaactaacagagttgaacctttcttttgatagagcagttttgaaacactctttttgtaaaatctgcaagaggatatttggatagctttgaggatttcgttgcaaacgggaatggcttcatataaactctagacagaagcattctcagaaacttcgttgggatgtttcgattgaagtcccagtgttgaacattcccttttatagagcaggttggaaacactctttctgcattccctggaagtggacatttggagcgctttcaggacgacggtgaaaatggaaatatcttccaagaaaatctagatagaagcaatgtcagaaacttttatgtgatggatctactcagctaacagagttgaacctttcttttgagagagcagttttgcaacactctttttgtggaatatgcaagtggatattagggcagctttgaggatttcgttggaaacgggaatacatgtaaaaagcagacagcagcattctcagaaacttctttgtgatgtttgcattgaagtcacagagttgaacattccctttgagagagcaggtttgaaacacgccttttgtcatatctggaagtgtccattcggagcgcattcaggcttgtgttgaaaaaggaaatatcctcccataaaaactagacagaagcattctcagaaacttatctgtgatgtatgtactcaactaacagaactaaaccatcgttttgaaggagcagttttgaaacactctttttgcggaatctgcaagtggatatttggctagctgggaggatttcgttggaaacgggattacatacaaaaagcagacagcagcattctcagaaacttctttgtgatgtttgcattcaagtcacagagttgaacattccctttcatagagcaggtttgaaacactctttttgtagtatctggatgtggacatttggatcgctttcaggcctatggtgaaaaaggaaatatcttcccatgaaaactagacagaagcattctcagaaacttatttgtgatgtgtgccctcaactgacagtgttgaacctttgttttgatagagcagttctgaaacacactttttgtaaaatctgcaagaggatatttggatagctttgaggatttcgttggaaacgggaatgtcttcatgtaaactctagacagaagcattctcagaaactgctttgggatgtttcaattgaagtcccagtgttgaacattccctttcatagagcaggtttgaaacactctttttgtactatctggaagtggacatttggagcgctttcaggtctacggtgaaaaaggagatatcttccaataaaaactagatagaagcaatgtcagaacttttttcgtgatgtatctactcagcaaacagagttgaacctttcttttgagagagcagttttgaaacactctttttgtggaatatgcaagtgggtattaggccagcttggaggatttcgttggaaacgggaatacgtataaaaagcagacagcagcattgtcagaaactactttgtgatgtttgcattcaagtcacagaattgaacactccctttcacagagcaggtttgaaacactctttttgtagtgtctgtaagtgaacatatggattgctttcaggcctaaggtgaaaaaggaaatatcttcccataaaaactagacagaagcattctcagaaacttgtttgtgatgtgtgccctctactgacagagttgaacctttctttgcaaagagcagttttgaaacactctttttgtagaatctgcaagaggatatttggatagctttgaggatttcttgggaaacgggaatgtcttcagataaactctagacagaagcattctcagaaacttctttgggatgtttcaattgaagtcacagtgttgaacattccctttcacagagcaggtttgaaacactctttttgtagtgtctataattgaacatttggcgtgctttcaggcctaacgtgaaaaaggaaatatcttcccataaaaactagacagaagcattctcagaaacttgttcgtgatgtgtgccctctactgacagagttgaacctttctttgcaaagagcagctttgaaacacactttttgtagaatctgcaagaggatatttggatagctttgaggatttcgttggaaacgggtatgtcttcagataaactctagacagaagcattctcagaaacttctttgggatgttgcattcaagtcacagagtagaacattcccattcatagagcagatttgaaacactctttttgtagtatctggaaatggacatttggagcgctttcaggcctatgttgaaaaaggaaatatcttcccataaaaactagacggaagcattctcagaaacttatttgtgatgtgtttgctcaactaacaggattgaaccatcgttttgaaggagcagttttgaaacactgttttcgtggaatctgcaagtggatatttggctagctttgaggatttcgttggaaacgggattacatataaaaaggagacagcagcattctcagaaacttctttgtgatgtttgcattcaagtcacagagttgaacattccctttcatagagcaggttggaaacactctttttgtagtatctggatgtggacatttggatcgctttcaggcctatggtgaaaaaggaaatatcttcccatgaaaactagacagaagcattctcagaaacttatttgtgatgtgtgcactcaactgacagtgttgaacctttgttttgatagagcagttctgaaacacactttttgtaaaatctgcaagaggatatttggatagctttgaggatttcgttggaaacgggaatgtcttcatgtaaactctagacagaagcattctcagaaactgatttgggatgtttcaattgaagtcccagtgttgaacattcccattcatagagcaggtttgaaacactctttttctactatctggaagtggacatttggagcgctttcaggtctacggtgaaaaaggagatatcttccaataaaaactagatagaagcaatgtcagaacttttttcatgatgtatctactcagcaaacagagttgaacctttcttttgagagagcagttttgacactgtctttgtggaatatgcaagtgggtattaggccagcttggaggatttcgttggaaacgggaatacgtataaaaagcagacagcagcattgtcagaaactactttgtgatgtttgcattcaagtcacagaattgaacactccctttcacagagcaggtttgaaacactctttttgtagtgtctgtaagtgaacatttggattgctttcaggcctatggtgaaaaaggaaatatcttcccataaaaactagacagaagcattctcagaaacttgtttgtgatgtgtgccctctactgacagagttgaacctttctttgcaaagagcagttttgaaacactctttttgtagaatctgcaagaggatatttggatagctttgaggatttcttgggaaacgggaatgtcttcagataaactctagacagaagcattctcagaaacttctttgggatgtttcaattgaagtcacagtgttgaacattccctttcacagagcaggtttgaaacactctttttgtagtgtctataagtgaacatttggcgtgctttcaggcctaacgtgaaaaaggaaatatcttcccataaaaactagacagaagcattctcagaaacttgttcgtgatgtgtgccctctactgacagagttgaacctttctttgcaaagagcagctttgaaacactctttttgtagaatctgcaagaggatatttggatagctttgaggatttcgttggaaacgggtatgtcttcagataaactctagacagaagcattctcagaaacttctttgggatgttgcattcaagtcacagagtagaacattcccattcatagagcagatttgaaacactctttttgtagtatctggaagtggacatttggagcgctttcaggcctatgttgaaaaaggaaatatcttcccataaaaactagacggaagcattctcagaaacttacttgtgatgtgtttgctcaactaacagaattgaaccatcgtttggaaggagcagttttgaaacactgttttcgtggaatctgcaagtggatatttggctagctttgaggatttcgttggaaacgggattacatataaaaaggagacagcagcattctcagaaactactttgtgatgtctgcattcaattcacagagttgagcattccctttcatagagcaggttggaaacactctttttgtagtatctggatgaggacattgggagcgctttcaggcgtatggtgagaaaggaaatatcttcccgtaaaaactagacagaagcattctcagaagtttatttgtgatgtgtgccctcaactaacagagttgaacctttcttttgatagagcagttttgaaacactctttttgtaaaatctgcaagaggatatttggatagctttgaggatttcgttgcaaacgggaatggcttcatataaactctagacagaagcattctcagaaacttcgttgggatgtttcgattgaagtcccagtgttgaacattcccttttatagagcaggttggaaacactctttctgcattccctggaagtggacatttggagcgctttcaggacgacggtgaaaatggaaatatcttccaagaaaatctagatagaagcaatgtcagaaacttctatgtgatggatctactcagctaacagagttgaagctttcttttgagagagcagttttgcaacactctttttgtggaatatgcaagtggatattagggcagctttgaggatttcgttggaaacgggaatacatgtaaaaagcagacagcagcattctcagaaacttctttgtgatgtttgcattgaagtcacagagttgaacattccctttgagagagcaggtttgaaacacgccttttgtcatatctggaagtgtccattcggagcgcattcaggcttgtgttgaaaaaggaaatatcctcccataaaaactagacagaagcattctcagaaacttatctgtgatgtatgtactcaactaacagaactaaaccatcgttttgaaggagcagttttgaaacactctttttgcggaatctgcaagtggatatttggctagctgggaggatttcgttggaaacgggattacatacaaaaagcagacagcagcattctcagaaacttctttgtgatgtttgcattcaagtcacagagttgaacattccctttcatagagcaggtttgaaacactctttttgtagtatctggatgtggacatttggatcgctttcaggcctatggtgaaaaaggaaatatcttcccatgaaaactagacagaagcattctcagaaacttatttgtgatgtgtgccctcaactgacagtgttgaacctttgttttgatagagcagttctgaaacacactttttgtaaaatctgcaagaggatatttggatagctttgaggatttcgttggaaacgggaatgtcttcatgtaaactctagacagaagcattctcagaaactgctttgggatgtttcaattgaagtcccagtgttgaacattccctttcatagagcaggtttgaaacactctttttgtactatctggaagtggacatttggagcgctttcaggtctacggtgaaaaaggagatatcttccaataaaaactagatagaagcaatgtcagaacttttttcatgatgtatctactcagcaaacagagttgaacctttcttttgagagagcagttttgaaacactctttttgtggaatatgcaagtgggtattaggccagcttggaggatttcgttggaaacgggaatacgtataaaaagcagacagcagcattgtcagaaactactttgtgatgtttgcattcaagtcacagaattgaacactccctttcacagagcaggtttgaaacactctttttgtagtgtctgtaagtgaacatttggattgctttcaggcctaaggtgaaaaaggaaatatcttcccataaaaactagacagaagcattctcagaaacttgtttgtgatgtgtgccctctactgacagagttgaacctttctttgcaaagagcagttttgaaacaccctttttgtagaatctgcaagaggatatttggatagctttgaggatttcttgggaaacgggaatgtcttcagataaactctagacagaagcattctcagaaacttctttgggatgtttcaattgaagtcacagtgttgaacattccctttcacagagcaggtttgaaacactctttttgtagtgtctataagtgaacatttggcgtgctttcaggcctaacgtgaaaaaggaaatatcttcccataagaactagacagaagcattctcagaaacttgtttgtgatgtgtgcactctactgacagagttgaacctttccttgcaaagagcagctttgacacactctttttgtagaatctgcaagaggctatttggatagctttgaggatttcgttggaaacgggtatgtcttcagataaactctagacagaagcattctcagaaacttctttgagatgttgcattcaagtcacagagtagaacattcccattcatagagcagatttgaaacactctttttgtagtatctgaaagtggacatttggagcgctttcaggcctatgatgaaaaaggaaatatcttcccataaaaactagacggaagcattctcagaaacttacttgtgatgtgtttgctcaactaacagaattgaaccatcgttttgaaggagcagttttgaaacactgttttcgtggaatctgcaagtggatatttggctagctttgaggatttcgttggaaacgggattacatataaaaaggagacagcagcattctcagaaacttctttgtgatgtctgcattcaagtcacagagttgagcattccctttcatagagcaggttggaaacactctttttgtagtatctggatgaggacatttggagcgctttcaggcgtatggtgaaaaaggaaatatcttcccgtaaaaactagacagaagattctcagaaatttatttgtgatgtgtgccctcaactaacagagttgaacctttcttttgatagagcagttttcaaacactctttttgtaaaatctgcaagaggatatttggatagctttgaggatttcgttgcaaacgggaatggcttcatataaactctagacagaagcattctcagaaacttcgttgggatgtttcgattgaagtcccagtgttgaacattcccttttatagagcaggttggaaacactctttctgcattccctggaagtggacatttggagcgctttcaggacgacggtgaaaatggaaatatcttccaagaaaatctagatagaagcaacgtcagaaacttttatgtgatggatctactcagctaacagagttgaacctttcttttgagagagcagttttgcaacactctttttgtggaatatgcaagtggatattagggcagctttgaggatttcgttggaaacgggaatacatgtaaaaagcagacagcagcattctcagaaacttctttgtgatgtttgcattgaagtcacagagttgaacattccctttgagagagcaggtttgaaacacgccttttgtcatatctggaagtgtccattcggagcgcattcaggcttgtgttgaaaaaggaaatatcctcccagaaaaactagacagaagcattctcagaaacttatctgtgatgtatgtactcaactaacagaactaaaccatcgttttgaaggagcagttttgaaacactctttgtgcggaatctgcaagtggatatttggctagctgggaggatttcgttggaaacgggattacatacaaaaagcagacagcagcattctcagaaacttatttgtgatgtgtgccctcaactgacagtgttgaacctttgttttgatagagcagttctgaaacacactttttgtaaaatctgcaagaggatatttggatagctttgaggatttcgttggaaacgggaatgtcttcatgtaaactctggacagaagcattctcagaaactgctttgggatgtttcaattgaagtcccagtgttgaacattcccattcatagagcaggtttgaaacactctttttgtactatctggaagtggacatttggagcgctttcaggtctacggtgaaaaaggagatatcttccaataaaaactagatagaagcaatgtcagaacttttttcatgatgtatctactcagcaaacagagttgaacctttcttttgagggagcagttttgaaacactatttttgtggaatatgcaagtgggtattaggccagcttggaggatttcgttggaaacgggaatacgtataaaaagcagacagcagcattgtcagaaactacattgtgatgtttgcattcaagtcacagaattgaacactccctttcacagagcaggtttgaaacactctttttgtagtgtctgtaagtgaacatttggattgctttcaggcctaaggtgaaaaaggaaatatcttcccataaaaactagacagaagcattctcagaaactagtttgtgatgtgtgccctctactgacagagttgaacctttctttgcaaagagcagttttgaaacactctttttgtagaatctgcaagaggatatttggatagctttgaggatttcttgggaaacgggaatgtcttcagataaactctagacagaagcattctcagaaacttctttgggatgtttcaattgaagtcacagtgttgaacattccctttcacagagcaggtttgaaacactctttttgtagtgtctataagtgaacatttggcgtgctttcaggcgtaacgtgaaaaaggaaatatcttcccataaaaaccagacagaagcattctcagaaacttgttcgtgatgtgtgccctctactgacagagttgaacctttctttgcaaagagcagctttgaaacacactttttgtagaatctgcaagaggatatttggatagcttggaggatttcgttggaaacgggtatgtcttcagataaactctagacagaagcattctcagaaacttctttgggatgttgcattcaagtcacagagtagaacattcccattcatagagcagatttgaaacactctttttgtagtatctggaagtggacatttggagcgctttcaggcctatgttgaaaaaggaaatatcttcccataaaaactagacggaatcattctcagaaacttatttgtgatgtgtttgctcaactaacaggattgaaccatcgttttgaaggagcagttttgaaacactgttttcgtggaatctgcaagtggatatttggctagctttgaggatttcgttggaaacgggattacatataaaaaggagacagcagcattctcagaaacttctttgtgatgtctgcattcaagtcacagagttgagcattccctttcatagagcaggttggaaacactctttttgtagtatctggatgaggacatttggagcgctttcaggcctatggtgaaaaaggaaatatcttcccgtaaaaactagacagaagcattctcagaaatttatttgtgatgtgtgccctcaactaacagagttgaacctttcttttgatagagcagttttgaaacactctttttgtaaaatctgcaagaggatatttggatagctttgaggatttcattgcaaacgggaatggcttcatataaactctagacagaagcattctcagaaacttcgttgggatgtttcgattgaagtcccagtgttgaacattcccttttatagagcaggttggaaacactctttctgcattccctggaagtggacatttggagcgctttcaggacgacggtgaaaatggaaatatcttccaagaaaatctagatagaagcaacgtcagaaacttttatgtgatggatctactcagctaacagcagttgaacctttcttttgagagagcagttttgcaacactctttttgtggaatatgcaagtggatattagggcagctttgaggatttcgttggaaacgggaatacatgtaaaaaggagacagcagcattctcagaaacttctttgtgatgtttgcattgaagtcacagagttgaacattccctttgagagagcaggtttgaaacacgccttttgtcatatctggaagtgtccattcggagcgcattcaggcttgtgttgaaaaaggaaatatcctcccataaaaactagacagaagcattctcagaaacttatctgtgatgtatgtactcaactaacagaactaaaccatcgttttgaaggagcagttttgaaacactctttttgcggaatctgcaagtggatatttggctagctgggaggatttccgttggaaacgggattacatacaaaaagcagacagcagcattctcagaaacttctttgtgatgtttgcattcaagtcacagagttgaacattccctttcatagagcaggtttgaaacactctttttgtagtatctggatgtggacatttggatcgctttcaggcctatggtgaaaaaggaaatatcttcccatgaaaactagacagaagcattctcagaaacttatttgtgatgtgtgccctcaactgacagtgttgaacctttgttttgatagagcagttctgaaacacactttttgtaaaatctgcaagaggatatttggatagctttgaggatttcgttggaaacgggaatgtcttcatgtaaactctacacagaagcattctcagaaactgctttgggatgtttcaattgaagtcccagtgttgaacattcccattcatagagcaggtttgaaacactctttttgtactatctggaagtggacatttggagcgctttcaggtctacggtgaaaaaggagatatcttccaataaaaactagatagaagcaatgtcagaacttttttcatgatgtatctactcagctaacagagttgaacctttcttttgagagagcagttttgaaacactctttgtgtggaatatgcaagtgggtattaggccagcttggaggatttcgttggaaacgggaatacgtataaaaagcagacagcagcattgtcagaaactactttgtgatgtttgcattcaagtcacagaattgaacactccctttcacagagcaggtttgaaacactctttttgtagtgtctgtaagtgaacatttggattgctttcaggcctaaggtgaaaaaggaaatatcttcccataaaaactagacagaagcattctcagaaacttgtttgtgatgtgtgccctctactgacagagttgaacctttctttgcaaagagcagttttgaaacactctttttgtagaatctgcaagaggatatttggatagctttgaggatttcttgggaaacgggaatgtcttcagataaactctagacagaagcattctcagcaacttctttgggatgtttcaattgaagtcacagtgttgaacattccctttcacagagcaggtttgaaacactctttttgtagtgtctataagtgaacatttggcgtgctttcaggcgtaacgtgaaaaaggaaatatcttcccataaaaactagacagaagcattctcagaaacttgttcgtgatgtgtgccctctactgacagagttgaacctttctttgcaaagagcagctttgaaacacactttttgtagaatctgcaagaggatatttggatagcttggaggatttcgttggaaacgggtatgtcttcagataaactctagacagaagcattctcagaaacttctttgggatgttgcattcaagtcacagagtagaacattcccattcatagagcagatttgaaacactctttttgtagtatctggaagtggacatttggagcgctttcaggcctatgttgaaaaaggaaatatcttcccataaaaactagacggaagcattctcagaaacttatttgtgatgtgtttgctcaactaacaggattgaaccatcgttttgaaggagcagttttgaaacactgttttcgtggaatctgcaagtggatatttggctagctttgaggatttcgttggaaacgggattacatataaaaaggagacagcagcattctcagaaacttctttgtgatgtctgcattcaagtcacagagttgagcattccctttcatagagaaggttggaaacactctttttgtagtatctggatgaggacatttggagcgctttcaggcgtatggtgaaaaaggaaatatcttcccgtaaaaactagacagaagcattctcagaaatttatttgtgatgtgtgccctcaactaacagagttgaacctttcttctgatagagcagttttgaaacactctttttgtaaaatctgcaagaggatatttggatagctttgaggatttcgttgcaaacgggaatggcttcatataaactctagacagaagcattctcagaaacttcgttgggatgtttcgattgaagtcccagtgttgaacattcccttttatagagcaggttggaaacactctttctgcattccctggaagtggacatttggagcgctttcaggacgacggtgaaaatggaaatatcttccaagaaaatctagatagaagcaacgtcagaaacttttctgtgatggatctactcagctaacagagttgaacctttcttttgagagagcagttttgcaacactctttttgtggaatatgcaagtggatattagggcagctttgaggatttcgttggaaacgggaatacatgtaaaaagcagacagcagcattctcagaaacttctttgtgatgtttgcattgaagtcacagagttgaacattccctttgagagagcaggtttgaaacacgccttttgtcatatctggaagtgtccattcggagcgcattcaggcttgtgttgaaaaaggaaatatcctcccagaaaaactagacagaagcattctcagaaacttatctgtgatgtatgtactcaactaacagaactaaaccatcgttttgaaggagcagttttgaaacactctttttgcggaatctgcaagtggatatttggctagctgggaggatttcgttggaaacgggattacatacaaaaagcagacagcagcattctcagaaacttctttgtgatgtttgcattcaagtcacagagttgaacattccctttcatagagcaggtttgaaacactctttttgtagtatctggatgtggacatttggatcgctttcaggcctatggtgaaaaaggaaatatcttcccatgaaaactagacagaagcattctcagaaacttatttgtgatgtgtgccctcaactgacagtgttgaacctttgttttgatagagcagttctgaaacacactttttgtaaaatctgcaagaggatatttggatagctttgaggatttcgttggaaacgggaatgtcttcatgtaaactctagacagaagcattctcagaaactgctttgggatgtttcaattgaagtcccagtgttgaacattccctttcatagagcaggtttgaaaccctctttttgtactatctggaagtggacatttggagcgctttcaggtctacggtgaaaaaggagatatcttccaataaaaactagatagaagcaatgtcagaacttttttcatgatgtatctactcagcaaacagagttgaacctttcttttgagagagcagttttgaaacactccttttgtggaatatgcaagtgggtattaggccagcttggaggatttcgttggaaacgggaatacgtataaaaagcagacagcagcattgtcagaaactactttgtgatgtttgcattcaagtcacagaattgaacactccctttcacagagcaggtttgaaactctctttttgtagtgtctgtaagtgaacatttggattgctttcaggcctaaggtgaaaaaggaaatatcttcccataaaaactagacagaagcattctcagaaacttgtttgtgatgtgtgccctctactgacagagttgaacctttctttgcaaagagcagttttgaaacactctttttgtagaatctgcaagaggatatttggatagctttgaggatttcttgggaaacgggaatgtcttcagataaactctagacagaagcattctcagaaacttctttgggatgtgtcaattgaagtcacagtgttgaacattccctttcacagagcaggtttgaaacactctttttgtagtgtctataagtgaacatttggcgtgctttcaggcctaacgtgaaaaaggaaatatcttcccataaaaactagacagaagcattctcagaaacttgttcgtgatgtgtgccctctactgacagagttgaacctttctttgcaaagagcagctttgaaacactctttttgtagaatctgcaagaggatatttggatagcttggaggatttcgttggaaacgggtatgtcttcagataaactctagacagaaacattctcagaaacttcattgggatgttgcattcaagtcacagagtagaacattcccattcatagagcaggtttgaaacactctttttgtagtatctggaagtggacatttggagcgctttcaggcctatgttgaaaaaggaaatatcttcccataaaaactagacggaagcattctcagaaacttacttgtgatgtgtttgctcaactaacagaattgaaccatcgttttaaaggagcagttttgaaacactgttttcgtggaatctgcaagtggatatttggctagctttgaggatttcgttggaaacgggattacatataaaaaggagacagcagcattctcagaaacttctttgtgatgtctgcattcaattcacagagttgagcattccctttcatagagcaggttggaaacactctttttgtagtatctggatgaggacatttggagcgctttcaggcctatggtgaaaaaggaaatatcttcccgtaaaaactagacagaagcattctcagaaatttatttgtgatgtgtgccctcaactaacagagttgaacctttcttttgatagagcagttttgaaacactctttttgtaaaatctgcaagaggatatttggatagctttgaggatttcattgcaaacgggaatggcttcatataaactctagacagaagcattctcagaaacttcgttgggatgtttcgattgaagacccagtgttgaacattcccttttatagagcaggttggaaacactctttctgcattccctggaagtggacatttggagcgctttcaggacgacggtgaaaatggaaatatcttccaataaaatctagatagaagcaacgtcagaaacttttatgtgatggatctactcagctaacagagttgaacctttcttttgagagagcagttttgcaacactctttttgtggaatatgcaagtggatattagggcagctttgaggatttcgttggaaacgggaatacatgtaaaaagcagacagcagcattctcagaaacttctttgtgatgtttgtattgaagtcacagagttgaacattccctttgagagagcaggtttgaaacacgccttttgtcatatctggaagtgtccattcggagcgcattcaggcttgtgttgaaaaaggaaatatcctcccataaaaactagacagaagcattctcagaaacttatctgtgatgtatgtactcaactaacagaactaaaccatcgttttgaaggagcagttttgaaacactctttttgcggaatctgcaagtggatatttggctagctgggaggatttcgttggaaacgggattacatacaaaaagcagacagcagcattctcagaaacttaattgtgatgtgtttgctcaactaacaggattgaaccatcgttttgaaggagcagttttgaaacactgttttcgtggaatctgcaagtggatatttggctagctttgaggatttcgttggaaacgggattacatataaaaagcagacagcagcattctcagaaacttctttgtgatgtgtgccctcaactgacagtgttgaacctttgttttgatagagcagttctgaaacacactttttgtaaaatctgcaagaggatatttggatagctttgaggatttcgttggaaacgggaatgtcttcatgtaaactctggacagaagcattctcagaaactgctttgggatgtttcaattgaagtcccagtgttgaacattccctttcatagagcaggtttgaaacactctttttgtactatctggaagtggacatttggagcgctttcaggtctacggtgaaaaaggagatatcttccaataaaaactagatagaagcaatgtcagaacttttttcatgatgtatctactcagcaaacagagttgaacctttcttttgagagagcagttttgaaacactctttttgtggaatatgcaagtgggtattaggccagcttggaggatttcgttggaaacgggaatacgtataaaaagcagacagcagcattgtcagaaactactttgtgatgtttgcattcaagtcacagaattgaacactccctttcacagagcaggtttgaaacactctttttgtagtgtctgtaagtgaacatttggattgctttcaggcctaaggtgaaaaaggaaatatcttcccataaaaactagacagaagcattctcagaaacttgtttgtgatgtgtgccctctactgacagagttgaacctttctttgcaaagagcagttttgaaacactctttttgtagaatctgcaagaggatatttggatagctttgaggatttcttgggaaacgggaatgtcttcagataaactctagacagaagcattctcagaaacttctttgggatgtttcaattgaagtcacagtgttgaacattccctttcacagagcaggtttgaaacactctttttgtagtgtctataagtgaacatttggcgtgctttcaggcgtaacgtgaaaaaggaaatatcttcccataaaaactagacagaagcattctcagaaacttgttcttgatgtgtcccctctactgacagagttgaacctttctttgcaaagagcagctttgaaacactctttttgtagaatctgcaagaggatatttggatagcttggaggatttcgttggaaacgggtatgtcttcagataaactctagacagaagcattctcagaaacttctttgggatgttgcattcaagtcacagagtagaacattcccattcatagagcagatttgaaacactctttttgtagtatctggaagtggacatttggagcgctttcaggcctatgttgaaaaaggaaatatcttcccataaaaactagacggaagcattctcagaaacttaattgtgatgtgtttgctcaactaacaggattgaaccatcgttttgaaggagcagttttgaaacactgttttcgtggaatctgcaagtggatatttggctagctttgaggatttcgttggaaacgggattacatataaaaaggagacagcagcattctcagaaacttctttgtgatgtctgcattcaattcacagagttgagcattccctttcatagagcaggttggaaacactctttttgtagtatctggatgtggacatttggatcgctttcaggcctatggtgaaaaaggaaatatcttcccatgaaaactagacagaagcattctcagaaacttatttgtgatgtgtgccctcaactgacagtgttgaacctttgttttgatagagcagttctgaaacacactttttgtaaaatctgcaagaggatatttggatagctttgaggatttcgttggaaacgggaatgtcttcatgtaaactctagacagaagcattctcagaaactgctttgggatgtttcaattgaagtcccagtgttgaacattcccattcatagagcaggtttgaaacactctttttgtactatctggaagtggacatttggagcgctttcaggtctacggtgaaaaaggagatatcttccaataaaaactagatagaagcaatgtcagaacttttttcatgatgtatctactcagcaaacagagttgaacctttcttttgagagagcagttttgaaacactctttttgtggaatatgcaagtgggtattaggccagcttggaggatttcgttggaaacgggaatacgtataaaaagcagacagcagcattgtcagaaactactttgtgatgtttgcattcaagtcacagaattgaacactccctttcacagagcaggtttgaaacactctttttgtagtgtctgtaagtgaacatatggattgctttcaggcctaaggtgaaaaaggaaatatcttgcccataaaaactagacagaagcattctcagcaaacttgtttgtgatgtgtgccctctactgacagagttgaacctttctttgcaaagagcagttttgaaacactctttttgtagaatctgcaagaggatatttggatagctttgaggatttcttgggaaacgggaatgtcttcagataaactctagacagaagcattctcagaaacttctttgggatgtttcaattgaagtcacagtgttgaacattccctttcacagagcaggtttgaaacactctttttgtagtgtctataagtgaacatttggcgtgctttcaggcgtaacgtgaaaaaggaaatatcttcccataaaaactagacagaagcattctcagaaacttgttcgtgatgtgtgccctctactgacagagttgaacctttctttgcaaagagcagctttgaaacacactttttgtagaatctgcaagaggatatttggatagctttgaggatttcgttggaaacgggtatgtcttcagataaactctagacagaagcattctcagaaacttctttgggatgttgcattcaagtcacagagtagaacattcccattcatagagcagatttgaaacactctttttgtagtatctggaagtggacatttggagcgctttcaggcctatgttgaaaaaggaaatatcttcccataaaaactagacggaagcattctcagaaacttatttgtgatgtgtttgctcaactaacaggattgaaccatcgttttgaaggagcagttttgaaacactgttttcgtggaatctgcaagtggatatttggctagctttgaggatttcgttggaaacgggattacatataaaaaggagacagcagcattctcagaaacttctttgtgatgtttgcattcaattcacagagttgagcattccctttcatagagcaggttggaaacactctttttgtagtatctggatgtggacatttggatcgctttcaggcctatggtgaaaaaggaaatatcttcccatgaaaactagacagaagcattctcagaaacttatttgtgatgtgtgccctcaactgacagtgttgaacctttgttttgatagagcagttctgaaacacactttttgtaaaatctgcaagaggatatttggatagcttggaggatttcgttggaaacgggaatgtcttcatgtaaactctagacagaagcattctcagaaactgctttgggatgtttcaattgaagtcccagtgttgaacattccctttcatagagcaggtttgaaacactctttttgtactatctggaagtggacatttggagcgctttcaggtctacggtgaaaaaggagatatcttccaataaaaactagatagaagcaatgtcagaacttttttcatgatgtatctactcagcaaacagagttgaacctttcttttgagagagcagttttgaaacactctttttgtggaatatgcaagtgggtattaggccagcttggaggatttcgttggaaacgggaatacgtataaaaagcagacagcagcattgtcagaaactactttgtgatgtttgcattcaagtcacagaattgaacactccctttcacagagcaggtttgaaacactctttttgtagtgtctgtaagtgaacatttggattgctttcaggcctaaggtgaaaaaggaaatatcttcccataaaaactagacagaagcattctcagaaacttgtttgtgatgtgtgccctctactgacagagttgaacctttctttgcaaagaccagttttgaaacactctttttgtagaatctgcaagaggatatttggatagctttgaggatttcttgggaaacgggaatgtcttcagataaactctagacagaagcattctcagaaacttctttgggatgtttcaattgaagtcacagtgttgaacattccctttcacagagcaggtttgaaacactctttttgtagtgtctataagtgaacatttggcgtgctttcaggcctaaggtgaaaaaggaaatatacttcccataaaaactagacagaagcattctcagaaacttgttcgtgatgtgtgccctctactgacagagttgaacctttctttgcaaagagcagctttgaaacactctttttgtagtatctgcaagaggatatttggatagctttgaggatttcgttggaaacgggtatgtcttcagataaactctagacagaagcattctcagaaacttctttgggatgttgcattcaagtcacagagtagaacattcccattcatacagcagatttgaaacactctttttgtagtatctggaagtggacatttggagcgctttcaggcctatgttgaaaaaggaaatatcttcccataaaaactagacggaagcattctcagaaacttacttgtgatgtgtttgctcaactaacagaattgaaccatcgttttgaaggagcagttttgaaacactgttttcgtggaatctgcaagtggatatttggctagctttgaggatttcgttggaaacgggattacatataaaaaggagacagcagcattctcagaaacttctttgtgatgtctgcattcaagtcacagagttgagcattccctttcatagagcaggttggaaacactctttttgtagtatctggatgaggacatttggagcgctttcaggcgtatggtgaaaaaggaaatatcttcccgtaaaaactagacagaagcattctcagaaatttatttgtgatgtgtgccctcaactaacagagttgaacctttcttttgatagagcagttttgaaacactctttttgtaaaatctgcaagaggatatttggatagctttgaggatttcgttgcaaacgggaatggcttcatataaactctagacagaagcattctcagaaacttcgttgggatgtttcgattgaagtcccagtgttgaacattcccttttatagagcaggttggaaacactctttctgcattccctggaagtggacatttggagcgctttcaggacgacggtgaaaatggaaatatcttccaagaaaatctagatagaagcaacgtcagaaacttttctgtgatggatctactcagctaacagagttgaacctttcttttgagagagcagttttgcaacactctttttgtggaatatgcaagtggatattagggcagctttgaggatttcgttggaaacgggaatacatgtaaaaagcagacagcagcattctcagaaacttctttgtgatgtttgcattgaagtcacagagttgaacattccctttgagagagcaggtttgaaacacgccttttgtcatatctggaagtgtccattcggagcgcattcaggcttgtgttgaaaaaggaaatatcctcccataaaaactagacagaagcattctcagaaacttatctgtgatgtatgtactcaactaacagaactaaaccatcgttttgaaggagcagttttgaaacactctttttgcggaatctgcaagtggatatttggctagctgggaggatttcgttggaaacgggattacatacaaaaagcagacagcagcattctcagaaacttctttgtgatgtttgcattcaagtcacagagttgaacattccctttcatagagcaggtttgaaacactctttttgtagtatctggatgtggacatttggatcgctttcaggcctatggtgaaaaaggaaatatcttcccatgaaaactagacagaagcattctcagaaacttatttgtgatgtgtgccctcaactgacagtgttgaacctttgttttgatagagcacttctgaaacacactttttgtaaaatctgcaagaggatatttggatagctttgaggatttcgttggaaacgggaatgtcttcatgtaaactctacacagaagcattctcagaaactgctttgggatgtttcaattgaagtcccagtgttgaacattcccattcatagagcaggtttgaaacactctttttctactatctggaagtggacatttggagcgctttcaggtctacggtgaaaaaggagatatcttccaataaaaactagatagaagcaatgtcagaacttttttcatgatgtatctactcagcaaacagagttgaacctttcttttgagagagcagttttgaaacactctttttgtggaatatgcaagtgggtattaggccagcttggaggatttcgttggaaacgggaatacgtataaaaagcagacagcagcattgtcagaaactactttgtgatgtttgcattcaagtcacagaattgaacactccctttcacagagcaggtttgaaacactctttttgtagtgtctataagtgaacatttggcgtgctttcaggcctaacgtgaaaaaggaaatatcttcccataaaaactagacagaagcattctcagaaacttgtttgtgatgtgtgccctctactgacagagttgaacctttctttgcaaagaggagctttgaaacactctttttgtagaatctgcaagaggatatttggatagctttgaggatttcgttggaaacgggtatgtcttcagataaactctagacagaagcattctcagaaacttctttgggatgttgcattcaagtcacagagtagaacattcccattcatagagcagatttgaaacactctttttgtagtatctggaagtggacatttggagcgctttcaggcctatgttgaaaaaggaaatatcttcccataaaaactagacggaagcattctcagaaacttatttgtgatgtgtttgctcaactaacaggattgaaccatcgttttgaaggagcagttttgaaacactgttttcgtggaatctgcaagtggatatttggctagctttgaggatttcgttggaaacgggattacatataaaaaggagacagcagcattctcagaaacttctttgtgatgtctgcattcaattcacagagttgagcattccctttcatagagcaggttggaaacactctttttgtagtatctggatgaggacatttggagcgctttcaggcgtatggtgaaaaaggaaatatcttcccgtaaaaactagacagaagcattctcagaagtttatttgtgatgtgtgccctcaactaacagagttgaacctttcttttgatagagcagttttgaaacactctttttgtaaaatctgcaagaggatatttggatagctttgaggatttcgttgcgaacgggaatggcttcatataaactctagacagaagcattctcagaaacttcgttgggatgtttcgattgaagtcccagtgttgaacattcccttttatagagcaggttggaaacactctttctgcattccctggaagtggacatttggagcgctttcaggacgacggtgaaaatggaaatatcttccaagaaaatctagatagaagcaatgtcagaaacttttatgtgatggatctactcagctaacagagttgaacctttcttttgagagagcagttttgcaacactctttttgtggaatatgcaagtggatattagggcagctttgaggatttcgttggaaacgggaatacatgtaaaaagcagacagcagcattctcagaaacttctttgtgatgtttgcattgaagtcacagagttgaacattccctttgagagagcaggtttgaaacacgccttttgtcatatctggaagtgtccattcggagcgcattcaggcttgtgttgaaaaaggaaatatcctcccataaaaactagacagaagcattctcagaaacttatttgtgatatatgtactcaactaacagaactaaaccatcgttttgaaggagcagttttgaaacactctttttgcggaatctgcaagtggatatttggctagctgggaggatttcgttggaaacgggattacatacaaaaagcagacagcagcattctcagaaacttctttgtgatgtttgcattcaagtcacagagttgaacattccctttcatagagcaggtttgaaacactctttttgtagtatctggatgtggacatttggatcgctttcaggcctatggtgaaaaaggaaatatcttcccatgaaaactagacagaagcattctcagaaacttatttgtgatgtgtgccctcaactgacagtgttgaacctttgttttgatagagcagttctgaaacacactttttgtaaaatctgcaagaggatatttggatagctttgaggatttcgttggaaacgggaatgtcttcatgtaaactctagacagaagcattctcagcaaacttctttgggatgtttcaattgaagtcacagtgttgaacattccctttcacagagcaggtttgaaacactctttttgtagtgtctataattgaacatttggcgtgctttcaggcctaacgtgaaaaaggaaatatcttcccataaaaactagacagaagcattctcagaaacttgttcgtgatgtgtgccctctactgacagagttgaacctttctttgcaaagagcagctttgaaacactctttttgtagaatctgcaagaggatatttggatagctttgaggatttcgttggaaacgggtatgtcttcagataaactctagacagaagcattctcagaaacttctttgggatgttgcattcaagtcacagagtagaacattcccattcatagagcagatttgaaacactctttttgtagtatctggaagtggacatttggagcgctttcaggcctatgttgaaaaaggaaatatcttcccataaaaactagacggaagcattctcagaaacttacttgtgatgtgtttgctcaactaacagaattgaaccatcgttttgaaggagcagttttgaaacactgttttcgtggaatctgcaagtggatatttggctagctttgaggatttcgttggaaacgggattacatatacaaaggagacagcgcattctcaggaaacttctttgtgatgtctgcattcaagtcacagagttgagcattccctttcatagagcaggttggaaacactctttttgtagtatctggatgaggacatttggagcgctttcaggcctatggtgaaaaaggaaatatcttcccgtaaaaactagacagaagcattctcagaaatttatttgtgatgtgtgccctcaactaacagagttgaacctttcttttgatagagcagttttgaaacactctttttgtaaaatctgcaagaggatatttggatagctttgaggatttcattgcaaacgggaatggcttcatataaactctagacagaagcattctcagaaacttcgttgggatgtttcgattgaagtcccagtgttgaacattcccttttatagagcaggttggaaacactctttctgcattccctggaagtggacatttggagcgctttcaggacgacggtgaaaatggaaatatcttccaagaaaatctagatagaagcaatgtcagaaacttttatgtgatggatctactcagctaacagagttgaacctttcttttgagagagcagttttgcaacactctttttgtggaatatgcaagtggatattagggcagctttgaggatttcgttggaaacgggaatacatgtaaaaagcagacagcagcattctcagaaacttctttgtgatgtttgcattgaagtcacagagttgaacattccctttgagagagcaggtttgaaacacgccttttgtcatatctggaagtgtccattcggagcgcattcaggcttgtgttgaaaaaggaaatatcctcccataaaaactagacagaagcattctcagaaacttatctgtgatgtatgtactcaactaacagaactaaaccatcgttttgaaggagcagttttgaaacactctttttgcggaatctgcaagtggatatttggctagctgggaggatttcgttggaaacgggattacatacaaaaagcagagagcagcattctcagaaacttctttgtgatgtttgcattcaagtcacagagttgaacattccctttcatagagcaggtttgaaacactctttttgtagtatctggatgtggacatttggatcgctttcaggcctatggtgaaaaaggaaatatcttcccatgaaaactagacagaagcattctcagaaacttatttgtgatgtgtgccctcaactgacagtgttgaacctttgttttgatagagcagttctgaaacacactttttgtaaaatctgcaagaggatatttggatagatttgaggatttcgttggaaacgggaatgtcttcatgtaaactctagacagaagcattctcagaaactgctttgggatgtttcaattgaagtcccagtgttgaacattccctttcatagagcaggtttgaaacactctttttgtactatctggaagtggacatttggagcgctttcaggtctacggtgaaaaaggagatatcttccaataaaaactagatagaagcaatgtcagaacttttttcatgatgtatctactcagcaaacagagttgaagctttcttttgagagagcagttttgcaacactctttttgtggaatatgcaagtgggtattaggccagcttggaggatttcgttggaaacgggaatacgtataaaaagcagacagcagcattgtcagaaactactttgtgatgtttgcattcaagtcacagaattgaacactccctttcacagagcaggtttgaaacactctttttgtagtgtctgtaagtgaacatttggattgctttcaggcctaaggtgaaaaaggaaatatcttcccataaaaactagacagaagcattctcagaaacttgtttgtgatgtgtgccctctactgacagagttgaacctttctttgcaaagagcagttttgaaacactctttttgtagaatctgcaagaggatatttggatagctttgaggatttcttgggaaacgggaatgtcttcagataaactctagacagaagcattctcagaaacttctttgggatgtttcaattgaagtcacagtgttgaacattccctttcacagagcaggtttgaaacactctttttgtagtgtctataagtgaacatttggcgtgctttcaggcctaacgtgaaaaaggaaatatcttcccataaaaactagacagaagcattctcagaaacttgttcgtgatgtgtgccctctactgacagagttgaacctttctttgcaaagagcagctttgaaacactctttttgtagaatctgccagaggatatttggatagctttgaggatttcgttggaaacgggtatgtcttcagataaactctagacagaagcattctcagaaacttctttgggatgttgcattcaagtcacagagtagaacattcccattcatagagcagatttgaaacactctttttgtagtatctggaagtggacatttggagcgctttcaggcctatgttgaaaaaggaaatatcttcccataaaaactagacggaagcattctcagaaacttacttgtgatgtgtttgctcaactaacagaattgaaccatcgttttgaaggagcagttttgaaacactgttttcgtggaatctgcaagtggatatttggctagctttgaggatttcgttggaaacgggattacatataaaaaggagacagcagcattctcagaaacttctttgtgatgtctgcattcaagtcacagagttgagcattccctttcatagagcaggttggaaacactctttttgtagtatctggatgaggacatttggagcgctttcaggcgtatggtgaaaaaggaaatatcttcccgtaaaaactagacagaagcattctcagaaatttatttgtgatgtgtgccctcaactaacagagttgaacctttcttttgatagagcagttttgaaacactctttttgtaaaatctgcaagaggatatttggatagctttgaggatttcattgcaaacgggaatggcttcatataaactctagacagaagcattctcagaaacttcgttgggatgtttcgattgaagtcccagtgttgaacattcccttttatagagcaggttggaaacactctttctgcattccctggaagtggacatttggagcgctttcaggacgacggtgaaaatggaaatatcttccaagaaaatctagatagaagcaacgtcagaaacttttctgtgatggatctactcagctaacagagttgaacctttcttttgagagagcagttttgcaacactctttttgtggaatatgcaagtggatattagggcagctttgaggatttcgttggaaacgggaatacatgtaaaaagcagacagcagcattctcagaaacttctttgtgatgtttgcattgaagtcacagagttgaacattccctttgagagagcaggtttgaaacacgccttttgtcatatctggaagtgtccattcggagcgcattcaggcttgtgttgaaaaaggaaatatcctcccataaaaactagacagaagcattctcagaaacttatctgtgatgtatgtactcaactaacagaactaaaccatcgttttgaaggagcagttttgaaacactctttttgcggaatctgcaagtggatatttggctagctgggaggatttcgttggaaacgggattacatacaaaaagcagacagcagcattctcagaaacttctttgtgatgtttgcattcaagtcacagagttgaacattccctttcatagagcaggtttgaaacactctttttgtagtatctggatgtggacatttggatcgctttcaggcctatggtgaaaaaggaaatatcttcccatgaaaactagacagaagcattctcagaaacttatttgtgatgtgtgccctcaactgacagtgttgaacctttgttttgatagagcagttctgaaacacactttttgtaaaatctgcaagaggatatttggatagctttgaggatttcgttggaaacgggaatgtcttcatgtaaactctacacagaagcattctcagaaactgctttgggatgtttcaattgaagtcccagtgttgaacattcccattcatagagcaggtttgaaacactctttttgtactatctggaagtggacatttggagcgctttcaggtctacggtgaaaaaggagatatcttccaataaaaactagatagaagcaatgtcagaacttttttcatgatgtatctactcagcacacagagttgaacctttcttttgagagagcagttttgaaacactctttttgtggaatatgcaagtgggtattaggccagcttggaggatttcgttggaaacgggaatacgtataaaaagcagacagcagcattgtcagaaactactttgtgatgtttgcattcaagtcacagaattgaacactccctttcacagagcaggtttgaaacactctttttgtagtgtctgtaagtgaacatatggattgctttcaggcctaaggtgaaaaaggaaatatcttcccataaaaactagacagaagcattctcagaaacttgtttgtgatgtgtgccctctactgacagagttgaacctttctttgcaaagagcagttttgaaacactctttttgtagaatctgcaagaggatatttggatagctttgaagatttcttgggaaacgggaatgtcttcagataaactctagacaggaagcattctcagaaacttctttgggatgtttcaattgaagtcacagtgttgaacattccctttcacagagcaggtttgaaacactctttttgtagtgtctataagtgaacatttggcgtgctttcaggcctaacgtgaaaaaggaaatatcttcccataaaaactagacagaagcattctcagaaacttgttcatgatgtgtgccctctactgacagagttgaacctttctttgcaaagagcagctttgaaacactctttttgtagaatctgcaagaggatatttggatagcttggaggatttcgttggaaacgggtatgtcttcagataaactctagacagaagcattctcagaaacttctttgggatgttgcattcaagtcacagagtagaacattcccattcatagagcagatttgaaacactctttttgtagtatctggaagtggacatttggagcgctttcaggcctatgttgaaaaaggaaatatcttcccataaaaactagacggaagcattctcagaaacttacttgtgatgtgtttgctcaactaacagaattgaaccatcgtttggaaggagcagttttgaaacactgttttcgtggaatctgcaagtggatatttggctagctttgaggatttcgttggaaacgggattacatataaaaaggagacagcagcattctcagaaacttctttgtgatgtttgcattcaagtcacagagttgaacattccctttcatagagcaggtttgaaacactctttttgtagtatctggatgtggacatttggatcgctttcaggcctatggtgaaaaaggaaatatcttcccatgaaaactagacagaagcattctcagaaacttatttgtgatgtgtgccctcaactgacagtgttgaacctttgttttgatagagcagttctgaaacacactttttgtaaaatctgcaagaggatatttggatagctttgaggatttcgttggaaacgggagtgtcttcatgtaaactctagacagaagcattctcagaaactgctttgggatgtttcaattgaagtcccagtgttgaacattccctttcatagagcaggtttgaaaccctctttttgtactatctggaagtggacatttggagcgctttcaggtctacggtgaaaaaggagatatcttccaataaaaactagatagaagcaatgtcagaacttttttcatgatgtatctactcagcaaacagagttgaacctttcttttgagagagcagttttgaaacactccttttgtggaatatgcaagtgggtattaggccagcttggaggatttcgttggaaatgggaatacgtataaaaagcagacagcagcattgtcagaaactactttgtgatgtttgcattcaagtcacagaattgaacactccctttcacagagcaggtttgaaactctctttttgtagtgtctataagtgaacatttggcgtgctttcaggcgtaacgtgaaaaaggaaatatcttcccataaaaactagacagaagcattctcagaaacttgttcttgatgtgtgccctctactgacagagttgaacctttctttgcaaagagcagttttgaaacactctttttgtagaatctgcaagaggatatttggatagctttgaggatttcttgggaaacgggaatgtcttcagataaactctagacagaagcattctcagaaacttctttgggatgtttcaattgaagtcacagtgttgaacattccctttcacagagcaggtttgaaacactctttttgtagtgtctataagtgaacatttggcgtgctttcaggcctaacgtgaaaaaggaaatatcttcccataaaaactagacagaagcattctcagaaacttgttcttgatgtgtcccctctactgacagagttgaacctttctttgcaaagagcagctttgaaacactctttttgtagaatctgcaagaggatatttggatagcttggaggatttcgttggaaacgggtatgtcttcagataaactctagacagaagcattctcagaaacttctttgggatgttgcattcaagtcacagagtagaacattcccattcatagagcagatttgaaacactctttttgtagtatctggaagtggacatttggagcgctttcaggcctatgttgaaaaaggaaatatcttcccataaaaactagacggaagcattctcagaaacttacttgtgatgtgtttgctcaactaacagaattgaaccatcgttttgaaggagcagttttgaaacactgttttcgtggaatctgcaagtggatatttggctagctttgaggatttcgttggaaacgggattacatataaaaaggagacagcagcattctcagaaacttctttgtgatgtctgcattcaagtcacagagttgagcattccctttcatagagcaggttggaaacactctttttgtagtatctggatgaggacatttggagcgctttcaggcctatggtgaaaaaggaaatatcttcccgtaaaaactagacagaagcattctcagaaatttatttgtgatgtgtgccctcaactaacagagttgaacctttcttttgatagagcagttttgaaacactctttttgtaaaatctgcaagaggatatttggatagctttgaggatttcattgcaaacgggaatggcttcatataaactctagacagaagcattctcagaaacttcgttgggatgtttcgattgaagtcccagtgttgaacattcccttttatagagcaggttggaaacactctttctgcattccctggaagtggacatttggagcgctttcaggacgacggtgaaaatggaaatatcttccaagaaaatctagatagaagcaatgtcagaaacttttctgtgatggatctactcagctaacagagttgaacctttcttttgagagagcagttttgcaacactctttttgtggaatatgcaagtgattattagggcagctttgaggatttcgttggaaacgggaatacatgtaaaaagcagacagcagcattctcagaaacttctttgtgatgtttgcattgaagtcacagagttgaacattccctttgagagagcaggtttgaaacacgccttttgtcatatctggaagtgtccattcggagcgcattcaggcttgtgttgaaaaaggaaatatcctcccataaaaactagacagaagcattctcagaaacttatctgtgatgtatgtactcaactaacagaactaaaccatcgttttgaaggagcagttttgaaacactctttttgcggaatctgcaagtggatatttggctagctgggaggatttcgttggaaacgggattacatacaaaaagcagacagcagcattctcagaaacttctttgtgatgtttgcattcaagtcacagagttgaacattccctttcatagagcaggtttgaaacactctttttgtagtatctggatgtggacatttggatcgctttcaggcctatggtgaaaaaggaaatatcttcccatgaaaactagacagaagcattctcagaaacttatttgtgatgtgtgccctcaactgacagtgttgaacctttgttttgatagagcagttctgaaacacactttttgtaaaatctgcaagaggatatttggatagctttgaggatttcgttggaaacgggaatgtcttcatgtaaactctacacagaagcattctcagaaactgctttgggatgtttcaattgaagtcctagtgttgaacattcccattcatagagcaggtttgaaacactctttttgtactatctggaagtggacatttggagcgctttcaggtctacggtgaaaaaggagatatcttccaataaaaactagatagaaagcaatgtcagaacttttttcatgatgtatctactcagcaaacagagttgaacctttcttttgagagagcagttttgaaacactctttttgtggaatatgcaagtgggtattaggccagcttggaggatttcgttggaaacgggaatacgtataaaaagcagacagcagcattgtcagaaactactttgtgatgtttgcattcaagtcacagaattgaacactccctttcacagagcaggtttgaaacactctttttgtagtgtctgtaagtgaacatatggattgctttcaggcctaaggtgaaaaaggaaatatcttcccataaaaactagacagaagcattctcagaaacttgtttgtgatgtgtgccctctactgacagagttgaacctttctttgcaaagagcagttttgaaacactctttttgtagaatctgcaagaggatatttggatagctttgaagatttcttgggaaacgggaatgtcttcagataaactctagacagaagcattctcagaaacttctttgggatgtttcaattgaagtcacagtgttgaacattccctttcacagagcaggtttgaaacactctttttgtagtgtctataagtgaacatttggcgtgctttcaggcctaacgtgaaaaaggaaatatcttcccataaaaactagacagaagcattctcagaaacttgttcgtgatgtgtgccctctactgacagagttgaacctttctttgcaaagagcagctttgaaacacactttttgtagaatctgcaagaggatatttggatagcttggaggatttcgttggaaacgggtatgtcttcagataaactctagacagaagcattctcagaaacttctttgggatgttgcattcaagtcacagagtagaacattcccattcatagagcagatttgaaacactctttttgtagtatctggaagtggacatttggagcgcttcaggcctatgttgaaaaaggaaatatcttcccataaaaactagacggaagcattctcagaaacttacttgtgatgtgtttgctcaactaacagaattgaaccatcgttttgaaggagcagttttgaaacactgttttcgtggaatctgcaagtggatatttggctagctttgaggatttcgttggaaacgggattacatataaaaaggagacagcagcattctcagaaacttctttgtgatgtctgcattcaattcacagagttgagcattccctttcatagagcaggttggaaacactctttttgtagtatctggatgaggacatttggagcgctttcaggcgtatggtgaaaaaggaaatatcttcccgtaaaaactagacagaagcattctcagaaatttatttgtgatgtgtgccctcaactaacagagttgaacctttcttttgatagagcagttttgaaacactctttttgtaaaatctgcaagaggatatttggatagctttgaggatttcattgcaaacgggaatggcttcatataaactctagacagaagcattctcagaaacttcgttgggatgtttcgattgaagtcccagtgttgaacattcccttttatagagcaggttggaaacactctttctgcattccctggaagtggacatttggagcgctttcaggacgacggtgaaaatggaaatatcttccaagaaaatctagatagaagcaacgtcagaaacttttctgtgatggatctactcagctaacagagttgaacctttcttttgagagagcagttttgcaacactctttttgtggaatatgcaagtggatattagggcagctttgaggatttcgttggaaacgggaatacatgtaaaaagcagacagcagcattctcagaaacttctttgtgatgtttgcattgaagtcacagagttgaacattccctttgagagagcaggtttgaaacacgccttttgtcatatctggaagtgtccattcggagcgcattcaggcttgtgttgaaaaaggaaatatcctcccataaaaactagacagaagcattctcagaaacttatctgtgatgtatgtactcaactaacagaactaaaccatcgttttgaaggagcagttttgaaacactctttttgcggaatctgcaagtggatatttggctagctgggaggatttcgttggaaacgggattacatacaaaaagcagacagcagcattctcagaaacttctttgtgatgtttgcattcaagtcacagagttgaacattccctttcatagagcaggttggaaacactctttttgtagtatctggatgtggacatttggatcgctttcaggcctatggtgaaaaaggaaatatcttcccatgaaaactagacagaagcattctcagaaacttatttgtgatgtgtgccctcaactgacagtgttgaacctttgttttgatagagcagttctgaaacacactttttgtaaaatctgcaagaggatatttggatagctttgaggatttcgttggaaacgggaatgtcttcatgtaaacttctagacagaagcattctcagaaactgctttgggatgtttcaattgaagtcccagtgttgaacattccctttcatagagcaggtttgaaacactctttttgtactatctggaagtggacattcggagcgctttcaggtctacggtgaaaaaggagatatcttccaataacaactagatagaagcaatgtcagaacttttttcatgatgtatctactcagcaaacagagttgaacctttcttttgagagagcagttttgaaacactctttttgtggaatatgcaagtgggtattaggccagcttggaggatttcgttggaaacgggaatacgtataaaaagcagacagcagcattgtcagaaactactttgtgatgtttgcattcaagtcacagaattgaacactccctttcacagagcaggtttgaaacactctttttgtagtgtctgtaagtgaacatttggattgctttcaggcctgaggtgaaaaaggaaatatcttcccataaaaactagacagaagcattctcagaaacttgtttgtgatgtgtgccctctactgacagagttgaacctttctttgcaaagagcagttttgaaacactctttttgtagaatctgcaagaggatatttggatagctttgaggatttcttgggaaacgggaatgtcttcagataaactctagacagaagcattctcagaaacttctttgggatgtttcaattgaagtcacagtgttgaacattccctttcacagagcaggtttgaaacactctttttgtagtgtctataagtgaacatttggcgtgctttcaggcctaacgtgaaaaaggaaatatcttcccataaaaactagacagaagcattctcagaaacttgttcttgatgtgtcccttctactgacagagttgaacctttctttgcaaagagcatctttgaaacactctttttgtagaatctgcaagaggatatttggatagctttgaggatttcgttggaaacgggtatgtcttcagataaactctagacagaagcattctcagaaacttctttgggatgttgcattcaagtcacagagtagaacattcccattcatagagcagatttgaaacactctttttgtagtatctggaagtggacatttggagcgctttcaggcctatgttgaaaaaggaaatatcttcccataaaaactagacggaagcattctcagaaacttatttgtgatgtgtttgctcaactaacaggattgaaccatcgttttgaaggagcagttttgaaacactgttttcgtggaatctgcaagtggatatttggctagctttgaggatttcgttggaaacgggattacatataaaaaggagacagcagcattctcagaaacttctttgtgatgtctgcattcaattcacagagttgagcattccctttcatagagcaggttggaaacactctttttgtagtatctggatgaggacatttggagcgctttcaggcctatggtgaaaaaggaaatatcttcccgtaaaaactagacagaagcattctcagaaatttatttgtgatgtgtgccctcaactaacagagttgaacctttcttttgatagagcagttttgaaacactctttttgtaaaatctgcaagaggatatttggatagctttgaggatttcgttgcaaacgggaatggcttcatataaactctagacagaagcattctcagaaacttcgttgggatgtttcgattgaagtcccagtgttgaacattcccttttatagagcaggttggaaacactctttctgcattccctggaagtggacatttggagcgctttcaggacgacggtgaaaatggaaatatcttccaagaaaatctagatagaagcaacgtcagaaacttttctgtgatggatctactcagctaacagagttgaacctttcttttgagagagcagttttgcaacactctttttgtggaatatgcaagtggatattagggcagctttgaggatttcgttggaaatgggaatacatgtaaaaagcagacagcagcattctcagaaacttctttgtgatgtttgcattgaagtcacagagttgaacattccctttgagagagcaggtttgaaacacgccttttgtcatatctggaagtgtccattcggagcgcattcaggcttgtgttgaaaaaggaaatatcctcccataaaaactagacagaagcattctcagaaacttatttgtgatgtatgtactcaagtaacagaactaaaccatcgttttgaaggagcagttttgaaacactctttttgcggaatctgcaagtggatatttggctagctgggaggatttcgttggaaacgggattacatacaaaaagcagacagcagcattctcagaaacttctttgtgatgtttgcattcaagtcacagagttgaacattccctttcatagagcaggtttgaaacactctttttgtagtatctggatgtggacatttggatcgctttcaggcctatggtgaaaaaggaaatatcttcccatgaaaactagacagaagcattctcagaaacttatttgtgatgtgtgccctcaactgacagtgttgaacctttgttttgatagagcagttctgaaacacactttttgtaaaatctgcaagaggatatttggatagctttgaggatttcgttggaaacgggaatgtcttcatgtaaactctagacagaagcattctcagaaactgctttgggatgtttcaattgaagtcccagtgttgaacattcccattcatagagcaggtttgaaacactctttttgtactatctggaagtggacatttggagcgctttcaggtctacggtgaaaaaggagatatcttccaataaaaactagatagaagcaatgtcagaacttttttcatgatgtatctactcagcaaacagagttgaacctttcttttgagagagcagtttcgaaacactctttctgtggaatatgcaagtgggtattaggccagcttggaggatttcgttggaaacgggaatacgtataaaaagcagacagcagcattgtcagaaactactttgtgatgtttgcattcaagtcacagaattgaacactccctttcacagagcaggtttgaaacactctttttgtagtgtctgtaagtgaacatatggattgctttcaggcctaaggtgaaaaaggaaatatcttcccataaaaactagacagaagcattctcagaaacttgtttgtgatgtgtgccctctactgacagagttgaacctttctttgcaaagagcagctttgaaacactctttttgtagaatctgcaagaggatatttggatagcttggaggatttcgttggaaacgggtatgtcttcagataaactctagacagaagcattctcagaaacttctttgggatgttgcattcaagtcacagagtagaacattcccattcatagagcagatttgaaacactctttttgtagtatctggaagtggacatttggagcgctttcaggcctatgttgaaaaaggaaatatcttcccataaaaactagacggaagcattctcagaaacttacttgtgatgtgtttgctcaactaacagaattgaaccatcgttttgaaggagcagttttgaaacactgttttcgtggaatctgcaagtggatatttggctagctttgaggatttcgttggaaacgggattacatataaaaaggagacagcagcattctcagaaacttctttgtgatgtctgcattcaagtcacagagttgagcattccctttcatagagaaggttggaaacactctttttgtagtatctggatgaggacatttggagcgctttcaggcgtatggtgaaaaaggaaatatcttcccgtaaaaactagacagaagcattctcagaaatttatttgtgatgtgtgccctcaactaacagagttgaacctttcttttgatagagcagttttgaaacactctttttgtaaaatctgcaagaggatatttggatagctttgaggatttcgttgcaaacgggaatggcttcatataaactctagacagaagcattctcagaaacttcgttgggatgtttcgattgaagtcccagtgttgaacattcccttttatagagcaggttggaaacactctttctgcattccctggaagtggacatttggagcgctttcaggacgacggtgaaaatggaaatatcttccaagaaaatctagatagaagcaacgtcagaaacttttctgtgatggatctactcagctaacagagttgaacctttcttttgagagagcagttttgcaacactctttttgtggaatatgcaagtggatattagggcagctttgaggatttcgttggaaacgggaatacatgtaaaaagcagacagcagcattctcagaaacttctttgtgatgtttgcattgaagtcacagagttgaacattccctttgagagagcaggtttgaaacacgccttttgtcatatctggaagtgtccattcggagcgcattcaggcttgtgttgaaaaaggaaatatcctcccataaaaactagacagaagcattctcagaaacttatctgtgatgtatgtactcaactaacagaactaaaccatcgttttgaaggagcagttttgaaacactctttttgcggaatctgcaagtggatatttggctagctgggaggatttcgttggaaacgggattacatacaaaaagcagacagcagcattctcagaaacttctttgtgatgtttgcattcaagtcacagagttgaacattccctttcatagagcaggtttgaaacactctttttgtagtatctggatgtggacatttggatcgctttcaggcctatggtgaaaaaggaaatatcttcccatgaaaactagacagaagcattctcagaaacttatttgtgatgtgtgccctcaactgacagtgttgaacctttgttttgatagagcagttctgaaacacactttttgtaaaatctgcaagaggatatttggatagctttgaggatttcgttggaaacgggaatgtcttcatgtaaactctagacagaagcattctcagaaactgctttgggatgtttcaattgaagtcccagtgttgaacattcccattcatagagcaggtttgaaacactctttttgtactatctggaagtggacatttggagcgctttcaggtctacggtgaaaaaggagatatcttccaataaaaactagatagaagcaatgttagaacttttttcatgatgtatctactcagcaaacagagttgaacctttcttttgagagagcagttttgaaacactctttttgtggaatatgcaagtgggtattaggtcagcttggaggatttcgttggaaacgggaatacgtataaaaagcagacagcagcattgtcagaaactactttgtgatgtttgcattcaagtcacagaattgaacactccctttcacagagcaggtttgaaacactctttttgtagtgtctgtaagtgaacatttggattgctttcaggcctaaggtgaaaaaggaaatatcttcccataaaaactagacagaagcattctcagaaacttgtttgtgatgtgtgccctctactgacagagttgaacctttctttgcaaagagcagttttgaaacactctttttgtagaatctgcaagaggatatttggatagctttgaggatttcttgggaaacgggaatgtcttcagataaactctagacagaagcattctcagaaacttctttgggatgtttcaattgaagtcacagtgttgaacattccctttcacagagcaggtttgaaacactctttttgtagtgtctataagtgaacatttggcgtgctttcaggcgtaacgtgaaaaaggaaatatcttcccataaaaactagacagaagcattctcagaaacttgttcgtgatgtgtgccctctactgacagagttgaacctttctttgcaaagagcagctttgaaacacactttttgtagaatctgcaagaggatatttggatagctttgaggatttcgttggaaacgggtatgtcttcagataaactctagacagaagcattctcagaaacttctttgggatgttgcattcaagtcacagagtagaacattcccattcatagagcagatttgaaacactctttttgtagtatctggaagtggacatttggagcgctttcaggcctatgttgaaaaaggaaatatcttcccataaaaactagacggaagcattctcagaaacttatttgtgatgtgtttgctcaactaacaggattgaaccatcgttttgaaggagcagttttgaaacactgttttcatggaatctgcaagtggatatttggctagctttgaggatttcgttggaaacgggattacatataaaaaggagacagcagcattctcagaaacttctttgtgatgtctgcattcaattcacagagttgagcattccctttcatagagcaggttggaaacactctttttgtagtatctggatgaggacatttggagagctttcaggcctatggtgaaaaaggaaatatcttcccgtaaaaactagacagaagcattctcagaagtttatttgtgatgtgtgccctcaactaacagagttgaacctttcttttgatagagcagttttgaaacactctttttgtaaaatctgcaagaggatatttggatagctttgaggatttcgttgcaaacgggaatggcttcatataaactctagacagaagcattctcagaaacttcgttgggatgtttcgattgaagtcccagtgttgaacattcccttttatagagcaggttggaaacactctttctgcattccctggaagtggacatttggagcgctttcaggacgacggtgaaaatggaaatatcttccaagaaaatctagatagaagcaatgtcagaaacttttatgtgatggatctactcagctaacagagttgaacctttcttttgagagagcagttttgcaacactctttttgtggaatatgcaagtggatattagggcagctttgaggatttcgttggaaacgggaatacatgtaaaaagcagacagcagcattctcagaaacttctttgtgatgtttgcattgaagtcacagagttgaacattccctttgagagagcaggtttgaaacacgccttttgtcatatctggaagtgtccattcggagcgcattcaggcttgtgttgaaaaaggaaatatcctcccataaaaactagacagaagcattctcagaaacttatttgtgatgtatgtactcaagtaacagaactaaaccatcgttttgaaggagcagttttgaaacactctttttgcggaatctgcaagtggatatttggctagctgggaggatttcgttggaaacgggattacatacaaaaagcagacagcagcattctcagaaacttctttgtgatgtttgcattcaagtcacagagttgaacattccctttcatagagcaggtttgaaacactctttttgtagtatctggatgtggacatttggatcgctttcaggcctatggtgaaaaaggaaatatcttcccatgaaaactagacagaagcattctcagaaacttatttgtgatgtgtgccctcaactgacagtgttgaacctttgttttgatagagcagttctgaaacacactttttgtaaaatctgcaagaggatatttggatagctttgaggatttcgttggaaacgggaatgtcttcatgtaaactctagacagaagcattctcagaaactgctttgggatgtttcaattgaagtcccactgttgaacattccctttcatagagcaggtttgaaacactctttttgtactatctggaagtggacatttggagcgctttcaggtctacggtgaaaaaggagatatcttccaataaaaactagatagaagcaatgtcagaacttttttcatgatgtatctactcagcaaacagagttgaacctttcttttgagagagcagttttgaaacactctttttgtggaatatgcaagtgggtattaggccagcttggaggatttcgttggaaacgggaatacgtataaaaagcagacagcagcattgtcagaaactactttgtgatgtttgcattcaagtcacagaattgaacactccctttcacagagcaggtttgaaacactctttttgtagtgtctgtaagtgaacatttggattgctttcaggcctaaggtgaaaaaggaaatatcttcccataaaaactagacagaagcattctcagaaacttgtttgtgatgtgtgccctctactgacagagttgaacctttctttgcaaagagcagttttgaaacactctttttgtagaatctgcaagaggatatttggatagctttgaggatttcttgggaaacgggaatgtcttcagataaactctagacagaagcatactcagaaacttctttgggacgtttcaattaaagtcacagtgttgaacattccctttcacagagcaggtttgaaacactctttttgtagtgtctataattgaacatttggcgtgctttcaggcctaacgtgaaaaaggaaatatcttcccataaaaactagacagaagcattctcagaaacttgttcgtgatgtgtgccctctactgacagagttgaacctttctttgcaaagagcagttttgaaacactctttttgtaaaatctgcaagaggatatttggatagcttggaggatttcgttggaaacgggtatgtcttcagataaactctagacagaagcattctcagaaacttctttgggatgttgcattcaagtcacagagtagaacattcccattcatagagcagatttgaaacactctttttgtagtatctggaagtggacatttggagcgctttcaggcctatgttgaaaaaggaaatatcttcccataaaaactagacggaagcattctcagaaacttatttgtgatgtgtttgctcaactaacaggattgaaccatcgttttgaaggagcagttttgaaacactgttttcgtggaatctgcaagtggatatttggcttgctttgaggatttcgttggaaacgggattacatataaaaaggagacagcagcattctcagaaacttctttgtgatgtctgcattcaattcacagagttgagcattccctttcatagagcaggttggaaacactctttttgtagtatctggatgaggacatttggagcgctttcaggcgtatggtgaaaaaggaaatatcttcccgtaaaaactagacagaagcattctcagaagtttatttgtgatgtgtgccctcaactaacagagtttaacctttcttttgatagagcagttttgaaacactctttttgtaaaatctgcaagaggatatttggatagctttgaggatttcgttgcaaacgggaatggcttcatataaactctagacagaagcattctcagaaacttcgttgggatgtttcgattgaagtcccagtgttgaacattcccttttatagagcaggttggaaacactctttctgcattccctggaagtggacatttggagcgctttcaggacgacggtgaaaatggaaatatcttccaagaaaatctagatagaagcaacgtcagaaacttttctgtgatggatctactcagctaacagagttgaacctttcttttgagagagcagttttgcaacactctttttgtggaatatgcaagtggatattagggcagccttgaggatttcgttggaaacgggaatacatgtaaaaagcagacagcagcattctcagaaacttctttgtgatgtttgcattgaagtcacagagttgaacattccctttgagagagcaggtttgaaacacgccttttgtcatatctggaagtgtccattcggagcgcattcaggcttgtgttgaaaaaggaaatatcctcccataaaaactagacagaagcattctcagaaacttatctgtgatgtatgtactcaactaacagaactaaaccatcgttttgaaggagcagttttgaaacactctttttgcggaatctgcaagtggatatttggctagctgggaggatttcgttggaaacgggattacatacaaaaagcagacagcagcattctcagaaacttctttgtgatgtttgcattcaagtcacagagttgaacattccctttcatagagcaggtttgaaacactctttttgtagtatctggatgtggacatttggatcgctttcaggcctatggtgaaaaatgaaatatcttcccatgaaaactagacagaagcattctcagaaacttatttgtgatgtgtgccctcaactgacagtgttgaacctttgttttgatagagcagttctgaaacacactttttgtaaaatctgcaagaggatatttggatagctttgaggatttcgttggaaacgggaatgtcttcatgtaaactctacacagaagcattctcagaaactgctttgggatgtttcaattgaagtcccagtgttgaacattccctttcatagagcaggtttgaaaccctctttttgtactatctggaagtggacatttggagcgctttcaggtctacggtgaaaaaggagatatcttccaataaaaactagatagaagcaatgtcagaacttttttcatgatgtatctactcagcaaacagagttgaacctttcttttgagagagcagttttgaaacactccttttgtggaatatgcaagtgggtattaggccagcttggaggatttcgttggaaacgggaatacgtataaaaaagcagacagcagcattgtcagaaactactttgtgatgtttgcattcaagtcacagaattgaacactccctttcacagagcaggtttgaaacactctttttgtagtgtctgtaagtgaacatttggattgctttcaggcctaaggtgaaaaaggaaatatcttcccataaaaactagacagaagcattctcagaaacttgtttgtgatgtgtgccctctactgacagagttgaacctttctttgcaaagagcagttttgaaacactctttttgtagaatctgcaagaggatatttggatagctttgaggatttcttgggaaacgggaatgtcttcagataaactctagacagaagcattctcagaaacttctttgggatgtttcaattgaagtcacagtgttgaacattccctttcacagagcaggtttgaaacactctttttgtagtgtctataagtgaacatttggcgtgctttcaggcctaacgtgaaaaaggaaatatcttcccataaaaactagacagaagcattctcagaaacttgttcgtgatgtgtgccctctactgacagagttgaacctttctttgcaaagagcagctttgaaacacactttttgtagaatctgcaggaggatatttggatagctttgaggatttcgttggaaacgggtatgtcttcagataaactctagacagaagcattctcagaaacttcttgggatgttgcattcaagtcacagagtagaacattcccattcatagagcagacttgaaacactctttttgtagtatctggaagtggacatttggagcgctttcaggcctatgttgaaaaaggaaatatcttcccataaaaactagacggaagcattctcagaaacttatttgtgatgtgtttgctcaactaacaggattgaaccatcgttttgaaggagcagttttgaaacactgttttcgtggaatctgcaagtggatatttggctagctttgaggatttcgttggaaacgggattacatataaaaaggagacagcagcattctcagaaacttctttgtgatgtctgcattcaattcacagagttgagcattccctttcatagagcacgttggaaacactctttttgtagtatctggatgaggacatttggagcgctttcaggcctatggtgaaaaaggaaatatcttcccgtaaaaactagacagaagcattctcagaagtttatttctgatgtgtgccctcaactaacagagttgaacctttcttttgatagagcagttttgaaacactctttttgtaaaatctgcaagaggatatttggatagctttgaggatttcgttgcaaacgggaatggcttcatataaactctagacagaagcattctcagaaacttcgttgggatgtttcgattgaagtcccagtgttgaacattcccttttatagagcaggttggaaacactctttctgcattccctggaagtggacatttggagcgctttcaggacgacggtgaaaatggaaatatcttccaagaaaatctagatagaagcaatgtcagaaacttttatgtgatggatctactcagctaacagagttgaacctttcttttgagagagcagttttgcaacactctttttgtggaatatgcaagtggatattagggcagctttgaggatttcgttggaaacgggaatacatgtaaaaagcagacagcagcattctcagaaacttctttgtgatgtttgcattgaagtcacagagttgaacattccctttgagagagcaggtttgaaacacgccttttgtcatatctggaagtgtccattcggagcgcattcaggcttgtgttgaaaaaggaaatatcctcccataaaaactagacagaagcattctcagaaacttatctgtgatgtatgtactcaactaacagaactaaaccatcgttttgaaggagcagttttgaaacactctttttgcggaatctgcaagtggatatttggctagctgggaggatttcgttggaaacgggattacatacaaaaagcagacagcagcattctcagaaacttctttgtgatgtttgcattcaagtcacagagttgaacattccctttcatagagcaggtttgaaacactctttttgtagtatctggatgtggacatttggatcgctttcaggcctatggtgaaaaaggaaatatcttcccatgaaaactagacagaagcattctcagaaacttgttcgtgatgtgtgccctctactgacagagttgaacctttctttgcaaagagcagctttgaaacacactttttgtagaatctgcaagaggatatttggatagctttgaggatttcgttggaaacgggtatgtcttcagatgaactctagacagaagcattctcagaaacttctttgggatgttgcatgcaagtcacagagtagaacattcccattcatagagcagatttgaaacactctttttgtagtatctggaagtggacatttggagcgctttcaggcctatgttgaaaaaggaaatatcttcccataaaaactagacggaagcattctcagaaacttaattgtgatgtgtttgctcaactaacaggattgaaccgtcgttttgaaggagcagttttgaaacactgttttcgtggaatctgcaagtggatatttggctagctttgaggatttcgttggaaacgggattacatataaaaaggagacagcagcattctcagaaacttctttgtgatgtctgcattcaattcacagagttgagcattccctttcatagagcaggttggaaacactctttttgtagtatctggatgaggacatttggagcgctttcaggcgtatggtgaaaaaggaaatatcttcccgtaaaaactagacagaagcattctcagaaatttatttgtgatgtgtgccctcaactaacagagttgaacctttcttttgatagagcagttttgaaacactctttttgtaaaatctgcaagaggatatttggatagctttgaggatttcgttgcaaacgggaatggcttcatataaactctagacagaagcattctcagaaacttcgttgggatgtttcgattgaagtcccagtgttgaacattcccttttatagagcaggttggaaacactctttctgcattccctggaagtggacatttggagcgctttcaggacgacggtgaaaatggaaatatcttccaagaaaatctagatagaagcaatgtcagaaacttttctgtgatggatctactcagctaacagagttgaacctttcttttgagagagcagttttgcaacactctttttgtggaatatgcaagtggatattagggcagcttgaggatttcgttggaaacgggaatacatgtaaaaagcagacagcagcattctcagaatcttctttgtgatgtttgcattgaagtcacagagttgaacattccctttgagagagcaggtttgaaacacgccttttgtcatatctggaagtgtccattcggagcgcattcaggcttgtgttgaaaaaggaaatatcctcccataaaaactagacagaagcattctcagaaacttatctgtgatgtatgtactcaactaacagaactaaaccatcgttttgaaggagcagttttgaaacactctttttgcggaatctgcaagtggatatttggctagctgggaggatttcgttggaaacgggattacatacaaaaagcagacagcagcattctcagaaacttctttgtgatgtttgcattcaagtcacagagttgaacattccctttcatagagcaggtttgaaacactctttttgtagtatctggatgtggacatttggatcgctttcaggcctatggtgaaaaaggaaatatcttcccatgaaaactagacagaagcattctcagaaacttatttgtgatatgtgccctcaactgacagtgttgaacctttgttttgatagagcagttctgaaacacactttttgtaaaatctgcaagaggatatttggatagctttgaggatttcgttggaaacgggaatgtcttcatgtaaactctacacagaagcattctcagaaactgctttgggatgtttcaattgaagtcccagtgttgaacattcccattcatagagcaggtttgaaacactctttttgtactatctggaagtggacatttggagcgctttcaggtctacggtgaaaaaggagatatcttccaataaaaactagatagaagcaatgtcagaacttttttcatgatgtatctactcagctaacagggttgaacctttcttttgagagagcagttttgaaacactctttttgtggaatatgcaagtgggtattaggccagcttggaggatttcgttggaaacgggaatacgtataaaaagtagacagcagcattgtcagaaactactttgtgatgtttgcattcaagtcacagaattgaacactccctttcacagagcaggtttgaaacactctttttgtagtgtctgtaagtgaacatttggattgctttcaggcctaaggtgaaaaaggaaatatcttcccataaaaactagacagaagcattctcagaaacttgtttgtgatgtgtgccctctactgacagagttgaacctttctttgcaaagagcagttttgaaacactctttttgtagaatctgcaagaggatatttggatagctttgaggatttcttgggaaacgggaatgtcttcagataaactctagacagaagcattctcagaaacttctttgggatgtttcaattgaagtcacagtgttgaacattccctttcccagagcaggtttgaaacactctttttgtagtgtctataagtgaacatttggcgtgctttcaggcctaacgtgaaaaaggaaatatcttcccataaaaactagacagaagcattctcagaaacttgttcttgatgtgtcccctctactgacagagttgaacctttctttgcaaagagcagctttgaaacactctttttgtagaatctgcaagaggatgtttggatagctttgaggatttcgttggaaacgggtatgtcttcagataaactctagacagaagcattctcagaaacttctttgggatgttgcattcaagtcacagagtagaacattcccattcatagagcagatttgaaacactctttttgtagtatctggaagtggacatttggagcgctttcaggcctatgttgaaaaaggaaatatcttcccataaaaactagacggaagcattctcagaaacttatttgtgatgtgtttgctcaactaacaggattgaaccatcgttttgaaggagcagttttgaaacactgttttcgtggaatctgcaagtggatatttggctagctttgaggatttcgttggaaacgggattacatataaaaaggagacagcagcattctcagaaacttctttgtgatgtctgcattcaattcacagagttgagcattccctttcatagagcaggttggaaacactctttttgtagtatctggatgaggacatttggagcgctttcaggcgtatggtgaaaaaggaaatatcttcccgtaaaaactagacagaagcattctcagaagtttatttgtgatgtgtgccctcaactaacagagttgaacctttcttttgatagagcagttttgaaacactctttttgtaaaatctgcaagaggatatttggatagctttgaggatttcgttgcaaacgggaatggcttcatataaactctagacagaaagcattctcagaaacttcgttgggatgtttcgattgaagtcccagtgttgaacattcccttttatagagcaggttggaaacactctttctgcattccctggaagtggacatttggagcgctttcaggacgacggtgaaaatggaaatatcttccaagaaaatctagatagaagcaatgtcagaaacttttatgtgatggatctactcagctaacagagttgaacctttcttttgagagagcagttttgcaacactctttttgtggaatatgcaagtggatattagggcagctttgaggatttcgttggaaacgggaatacatgtaaaaagcagacagcagcattctcagaaacttctttgtgatgtttgcattgaagtcacagagttgaacattccctttgagagagcaggtttgaaacacgccttttgtcatatctggaagtgtccattcggagcgcattcaggcttgtgttgaaaaaggaaatatcctcccataaaaactagacagaagcattctcagaaacttatctgtgatgtatgtactcaactaacagaactaaaccatcgttttgaaggagcagttttgaaacactctttttgcggaatctgcaagtggatatttggctagctgggaggatttcgttggaaacgggattacatacaaaaagcagacagcagcattctcagaaacttctttgtgatgtttgcattcaagtcacagagttgaacattccctttcatagagcaggtttgaaacactctttttgtagtatctggatgtggacatttggatcgctttcaggcctatggtgaaaaaggaaatatcttcccatgaaaactagacagaagcattctcagaaacttatttgtgatgtgtgccctcaactgacagtgttgaacctttgttttgatagagcagttctgaaacacactttttgtaaaatctgcaagaggatatttggatagctttgaggatttcgttggaaacgggaatgtcttcatgtaaactctagacagaagcattctcagaaactgctttgggatgtttcaactgaagtcccagtgttgaacattccctttcatagagcaggtttgaaacactctttttgtactatctggaagtggacatttggagcgctttcaggtctacggtgaaaaaggagatatcttccaataaaaactagatagaagcaatgtcagaacttttttcatgatgtatctactaagcaaacagagttgaacctttcttttgagagagcagttttgaaacactctttttgtggaatatgcaagtgggtattaggccagcttggaggatttcgttggaaacgggaatacgtataaaaagcagacagcagcattgtcagaaactactttgtgatgtttgcattcaagtcacagagttgaacactccctttcacagagcaggtttgaaacactctttttgtagtgtctgtaagtgaacatttggattgctttcaggcctaaggtgaaaaaggaaatatcttcccataaaaactagacagaagcattctcagaaacttgtttgtgatgtgcgccctctactgacagagttgaacctttctttgcaaagagcagttttgaaacactctttttgtagaatctgcaggaggatatttggatagctttgaggatttcttgggaaacgagaatgtcttcagataaactctagacagaagcattctcagaaacttctttgggatgtttcaattgaagtcacagtgttgaacattccctttcacagagcaggtttgaaacactctttttgtagtgtctataagtgaacatttggcgtgctttcaggcgtaacgtgaaaaaggaaatatcttcccataaaaaccagacagaagcattctcagaaacttgttcttgatgtgtcccctctactgacagagttgaacctttctttgcaaagagcagctttgaaacactctttttgtagaatctgcaagaggatatttggatagcttggaggatttcgttggaaacgggtatgtcttcagataaactctagacagaagcattctcagaaacttctttgggatgttgcattcaagtcacagagtagaacattcccattcatagagcagatttgaaacactctttttgtagtatctggaagtggacatttggagcgctttcaggcctatgttgaaaaaggaaatatcttcccataaaaactagacggaagcattctcagaaacttaattgtgatgtgtttgctcaactaacaggattgaaccatcgttttgaaggagcagttttgaaacacagttttcgtggaatctgcaagtggatatttggctagctttgaggatttcgttggaaacgggattacatataaaaaggagacagcagcattctcagaaacttctttgtgatgtctgcattcaattcacagagttgagcattccctttcatagagcaggttggaaacactctttttgtagtatctggatgtggacatttggatcgctttcaggcctatggtgaaaaaggaaatatcttcccatgaaaactagacagaagcattctcagaaacttatttgtgatgtgtgcactcaactgacagtgttgaacctttgttttgatagagcagttctgaaacacactttttgtaaaatctgcaagaggatatttggatagctttgaggatttcgttggaaacgggaatgtcttcatgtaaactctagacagaagcattctcagaaactgctttgggatgtttaaattgaagtcccagcgttgaacattcccattcatagagcaggtttgaaacactctttttgtactatctggaagtggacatttggagcgctttcaggtctacggtgaaaaaggagatatcttccaataaaaactagatagaagcaatgtcagaacttttttcatgatgtatctactcagcaaacagagttgaacctttcttttgagagagcagttttgacacagtctttgtggaatatgcaagtgggtattaggccagcttggaggatttcgttggaaacgggaatacgtataaaaagcagacagcagcattgtcagaaactactttgtgatgtttgcattcaagtcacagaattgaacactccctttcacagagcaggtttgaaacactctttttgtagtgtctataagtgaacatttggcgtgctttcaggcctaaggtgaaaaaggaaatatcttcccataaaaactagacagaagcattctcagaaacttgttcgtgatgtgtgccctctactgacagagttgaacctttctttgcaaagagcagctttgaaacactctttttgtagaatctgcaagaggatatttggatagctttgaggatttcgttggaaacgggtatgtcttcagataaactctagacagaagcattctcagaaacttctttgggatgttgcattcaagtcacagagtagaacattcccattcatagagcagatttgaaacactctttttgtagtatctggaagtggacatttggagcgctttcaggcctatgttgaaaaaggaaatatcttcccataaaaactagacggaagcattctcagaaacttacttgtgatgtgtttgctcaactaacagaattgaaccatcgttttgaaggagcagttttgaaacactgttttcgtggaatctgcaagtggatatttggctagctttgaggatttcgttggaaacgggattacatataaaaaggagacagcagcattctcagaaacttctttgtgatgtctgcattcaagtcacagagttgagcattccctttcatagagcaggttggaaacactctttttgtagtatctggatgaggacatttggagcgctttcaggcatatggtgaaaaaggaaatatcttcccgtaaaaactagacagaagcattctcagaaatttatttgtgatgtgtgccctcaactaacagagttgaacctttcttttgatagagcagttttgaaacactctttttgtaaaatctgcaagaggatatttggatagctttgaggatttcgttgcaaacgggaatggcttcatataaactctagacagaagcattctcagaaacttcgttgggatgtttcgattgaagtcccagtgttgaacattcccttttatagagcaggttggaaacactctttctgcattccctggaagtggacatttggagcgctttcaggacgacggtgaaaatggaaatatcttccaataaaatctagatagaagcaacgtcagaaacttttatgtgatggatctactcagctaacagagttgaacctttcttttgagagagcagttttgcaacactctttttgtggaatatgcaagtggatattagggcacctttgaggatttcgttggaaacggggaatacatgtaaaaagcagacagcagcattctcagaaacttctttgtgatgtttgcattgaagtcacagagttgaacattccctctgagagagcaggtttgaaacacgccttttgtcatatctggaagtgtccattcggagcgcattcaggcttgtgttgaaaaaggaaatatcctcccataaaaactagacagaagcattctcagaaacttatctgtgatgtatgtactcaactaaccgaactaaaccatcgttttgaaggagcagttttgaaacactctttttgcggaatctgcaagtggatatttggctagctgggaggatttcgttggaaacgggattacatacaaaaagcagacagcagcattctcagaaacttctttgtgatgtttgcattcaagtcacagagttgaacattccctttcatagagcaggtttgaaacactctttttgtagtatctggatgtggacatttggatcgctttcaggcctatggtgaaaaaggaaatatcttcccatgaaaactagacagaagcattctcagaaacttatttgtgatgtgtgccctcaactgacagtgttgaacctttgttttgatagagcagttctgaaacacactttttgtaaaatctgcaagaggatatttggatagctttgaggatttcgttggaaacgggaatgtcttcatgtaaactctagacagaagcattctcagaaactgctttgggatgtttcaattgaagtcccagtgttgaacattccctttcataggagcaggtttgaaacactctttttgtactatctggaagtggacatttggagcgctttcaggtctacggtgaaaaaggagatatcttccaataaaaactagatagaagcaatgtcagaacttttttcatgatgtatctactcagcaaacagagttgaacctttcttttgagagagcagttttgaaacactctttttgtggaatatgcaagtgggtattaggccagcttggaggatttcgttggaaacgggaatacgtataaaaagcagacagcagcattgtcagaaactactttgtgatgtttgcattcaagtcacagaactgaacactccctttcacagagcaggtttgaaacactctttttgtagtgtctgtaagtgaacatttggattgctttcaggcctaaggtgaaaaaggaaatatcttcccataaaaactagacagaagcattctcagaaacttgtttgtgatgtgtgccctctactgacagagttgaacctttctttgcaaagagcagttttgaaacactctttttgtagaatctgcaagagtatatttggatagctttgaggatttcttgggaaacgggaatgtcttcagataaactctagacagaagcattctcagaaacttctttgggatgtttcaattgaagtcacagtgttgaacattccctttcacagagcaggtttgaaacactctttttgtagtgtctataattgaacatttggcgtgctttcaggcctaacgtgaaaaaggaaatatcttcccataaaaactagacagaagcattctcagaaacttgttcgtgatgtgtgccctctactgacagagttgaacctttctttgcaaagagcagctttgaaacactctttttgtagaatctgcaagaggatatttggatagctttgaggatttcgttggaaacgggtatgtcttcagataaactctagacagaagcattctcagaaacttctttgggatgttgcatgcaagtcacagagtagaacattcccattcatagagcagatttgaaacactctttttgtagtatctggaagtggacatttggagcgctttcaggcctatgttgaaaaaggaaatatcttcccataaaaactagacggaagcattctcagaaacttatttgtgatgtgtttgctcaactaacaggattgaaccatcgttttgaaggagcagttttgaaacactgttttcgtggaatctgcaagtggatatttggctagctgggaggatttcgttggaaacgggattacatataaaaaggagacagcagcattctcagaaacttctttgtgatgtctgcattcaattcacagagttgagcattccctttcatagagcagattggaaacactctttttgtagtatctggatgaggacatttggagcgctttcaggcctatggtgaaaaaggaaatatcttcccgtaaaaactagacagaagcattctcagaagtttatttgtgatgtgtgccctcaactaacagagttgaacctttcttttgatagagcagttttgaaacactctttttgtaaaatctgcaagaggatatttggatagctttgaggatttcgttgcaaacgagaatggcttcacataaactctaggcagaagcattctcagaaacttcgttgggatgtttcgattgaagtcccagtgttgaacattcccttttatagagcaggttggaaacactctttctgctttccctggaagtggacatttggagcgctttcaggacgacggtgaaaatggaaatatcttccaagaaaatctagatagaagcaatgtcagaaacttttatgtgatggatctactcagctaacagagttgaacctttcttttgagagagcagttttgcaacactctttttgtggaatatgcaagtggatattagggcagctttgaggatttcgttggaaacgggaatacatgtaaaaagcagacagcagcattctcagaaacttctttgtgatgtttgcattgaagtcacagagttgaacattccctttgagagagcaggtttgaaacacgccttttgtcatatctggaagtgtccattcggagcgcattcaggcttgtgttgaaaaaggaaatatcctcccataaaaactagacagaagcattctcagaaacttatctgtgatgtatgtactcaactaacagaactaaaccatcgttttgaaggagcagttttgaaacactctttttgcggaatctgcaagtggatatttggctagctgggaggatttcgttggaaacgggattacatacaaaaagcagacagcagcattctcagaaacttctttgtgatgtttgcattcaagtcacagagttgaacattccctttcatagagcaggtttgaaacactctttttgtagtatctggatgtggacatttggatcgctttcaggcctatggtgaaaaaggaaatatcttcccatgaaaactagacagaagcattctcagaaacttatttgtgatgtgtgccctcaactgacagtgttgaacctttgttttgatagagcagttctgaaacacactttttgtaaaatctgcaagaggatatttggatagctttgaggatttcgttggaaacgggaatgtcttcatgtaaactctacacagaagcattctcagaaactgctttgggatgtttcaattgaagtcccagtgttgaacattccctttcatagagcaggtttgaaacactctttttgtactatctggaagtggacatttggagcgctttcacgtctacggtgaaaaaggagatatcttccaataaaaactagatagaagcaatgtcagaacttttttcatgatgtatctactcagcaaacagagttgaacctttcttttgagagagcagttttgaaacactctttttgtggaatatgaaagtgggtattaggccagcttggaggatttcgttggaaacgggaatacgtataaaaagcagacagcagcattgtcagaaactactttgtgatgtttgcattcaagtcacagaactgaacactccctttcacagagcaggtttgaaacactctttttgtagtgtctgtaagtgaacatttggattgctttcaggcctaaggtgaaaaaggaaatatcttcccataaaaactagacagaagcattctcagaaacttgtttgtgatgtgtgccctctactgacagagttgaacctttctttgcaaagagcagttttgaaacactctttttgtagaatctgcaagaggatatgtggatagctttgaggatttcgttggaaacgggtatgtcttcagataaactctagacagaagcattctcagaaacttctttgggatgtttcaattgaagtcacagtgttgaacattccctttcacagagcaggtttgaaacactctttttgtagtgtctataagtgaacatttggcgtgctttcaggcgtaacgtgaaaaaggaaatatcttcccataaaaaccagacagaagcattctcagaaacttgttcgtgatgtgtgccctctactgacagagttgaacctttctttgcaaagagcagctttgaaacacactttttgtagaatctgcatgaggatatttggatagctttgaggatttccttggaaacgggtatgtcttcagataaactctagacagaagcattctcagaaacttctttgggatgttgcatgcaagtcacagagtagaacattcccattcataaatcagatttgaaacactctttttgtagtatctggaagtggacatttggagcgctttcaggcctatgttgaaaaaggaaatatcttcccataaaaactagacggaagcattctcagaaacttatttgtgatgtgtttgctcaactaacaggattgaaccatcgttttgaaggagcagttttgaaacactgttttcgtggaatctgcaagtggatatttggctagctttgaggattttgttggaaacgggattacatataaaaaggagacagcagcattctgagaaacttctttgtgatgtctgcattcaattcacagagttgagcattccctttcatagagcaggttggaaacactctttttgtagtatctggatgtggacatttggatcgctttcaggcctatggtgaaaaaggaaatatcttcccatgaaaactagacagaagcattctcagaaacttatttgtgatgtgtgccctcaactgacagtgttgaacctttgttttgatagagcagttctgaaacacactttttgtaaaatctgcaagaggatatttggatagctttgaggatttcgttggaaacgggaatgtcttcatgtaaactctagacagaagcattctcagaaactgctttgggatgtttcaattgaaatcccagtgttgaacattcccattcatagagcaggtttgaaacactctttttgtactatctggaagtggacatttggagcgctttcaggtctacggtgaaaaaggagatatcttccaataaaaactagatagaagcaatgtcagaacttttttcatgatgtatctactcagcaaacagagttgaacctttcttttgagagagcagttttgaaacactctttttgtggaatatgcaagtgggtattaggccagcttggaggatttcgttggaaacgggaatacgtataaaaagcagacagcagcattgtcagaaactactttgtgatgtttgcatgcaagtcacagaatggaacactgcctttcacagagcaggtttgaaacactctttttgtagtgtctgtaagtgaacatttggattgctttcaggcctaaggtgaaaaaggaaatatcttcccataaaaactagacagaagcattctcagaaacttgtttgtgatgtgtgccctctactgacagagttgaacctttctttgcaaagagcagttttgaaacactctttttgtagaatctgcaagaggatatttggatagctttgaggatttcttgggaaacgggaatgtcttcagataaactctagacagaagcattctcagaaacttctttgggatgtttcaattgaagtcacagtgttgaacattccctttcacagagcaggtttgaaacactctttttgtagtgtctataagtgaacatttggcgtgctttcaggcctaacgtgaaaaaggaaatatcttcccataaaaactagacagaagcattctcagaaacttgttcgtgatgtgtgccctctaactgacagagttgaacctttctttgcaaagagcagctttgaaacactctttttctagaatctgcaagaggatatttggatagctttgaggatttcgttggaaacggggatgtcttcagataaactctagacagaagcattctcagaaacttctttgggatgttgcattcaagtcacagagtagaacattcccattcatagagcagatttgaaacactctttttgtagtatctggaagtggacatttggagcgctttcaggcctatgttgaaaaaggaaatatcttcccataaaaactagacggaagcattctcagaaacttacttgtgatgtgtttgctcaactaacagaattgaaccatcgttttgatggagcagttttgaaacactgttttcgtggaatctgcaagtggatatttggctagctttgaggatttcgttggaaacgggattacatataaaaaggagacagcagcattctcagaaacttctttgtgatgtctgcattcaattcacagagttgagcattccctttcatagagcaggttggaaacactctttttgtagtatctggatgaggacatttggagcgctttcaggcctatggtgaaaaaggaaatatcttcccgtaaaaactagacagaagcattctcagaagtttatttgtgatgtgtgccctcaactaacagagttgaacctttcttttgatagagcagttttgaaacactctttttgtaaaatctgcaagaggatatttggatagctttgaggatttcgttgcaaacgagaatggcttcacataaactctagacagaagcattctcagaaacttcgttgggatgtttcgattgaagtcccagtgttgaacattcccttttatagagcaggttggaaacactctttctgctttccctggaagtggacatttggagcgctttcaggacgacggtgaaaatggaaatatcttccaagaaaatctagatagaagcaatgtcagaaacttttatgtgatggatctactcagctaacagagttgaacctttcttttgagagagcagttttgcaacactctttttgtggaatatgcaagtggatattagggcagctttgaggatttcgttggaaacgggaatacatgtaaaaagcagacagcagcattctcagaaacttctttgtgatgtttgcattgaagtcacagagttgaacattccctttgagagagcaggtttgaaacacgccttttgtcatatctggaagtgtccattcggagcgcattcaggcttgtgttgaaaaaggaaatatcctcccataaaaactagacagaagcattctcagaaacttatttgtgatgtatgtactcaactaacagaactaaaccatcgttttgaaggagcagttttgaaacactctttttgcggaatctgcaactggatatttggctagcttggaggatttcgttggaaacgggattacatacaaaaagcagacagcagcattctcagaaacttctttgtgatgtttgcattcaagtcgcagagttgaacattccctttcatagagcaggtttgaaacactcattttgtagtatctggatgtggacatttggatcgctttcaggcctatggtgaaaaaggaaatatcttcccatgaaaactagacagaagcattctcagaaacttatttgtgatgtgtgccctcaactgacagtgttgaacctttgttttgatagagcagttctgaaacacactttttgtaaaatctgcaagaggatatttggatagctttgaggatttcgttggaaacgggaatgtcttcatgtaaactctagacagaagcattctcagaaactgctttgggatgtttcaattgaagtcccagtgttgaacattccctttcatagagcaggtttgaaacactctttttgtagtatctggaagtggacatttggagcgctttcaggtctacggtgaaaaaggagatatcttccaataaaaactagatagaagcaatgtcagaacttttttcatgatgtatctactcagcaaacagagttgaacctttcttttgagagagcagttttgaaacactctttttgtggaatatgcaagtgggtattaggccagcttggaggatttcgttggaaacgggaatacgtacaaaaagcagacagcagcattgtcagaaactactttgtgatgtttgcattcaagtcacagaattgaacactccctttcacagagcaggtttgaaacactctttttgtagtgtctgtaagtgaacatttggattgctttcaggcctaaggtgaaaaaggaaatatcttcccataaaaactagacagaagcattctcagaaacttgtttgtgatgtgtgccctctactgacagagttgaacctttctttgcaaagagcaggtttgaaacactctttttgtagaatctgcaagaggatatttggatagctttgaggatttcttgggaaacgggaatgtcttcagataaactctagacagaagcattctcagaaacttctttgggatgtttcaattgaagtcacagtgttgaacattccctttcacagagcaggtttgaaacactctttttgtagtgtctataagtgaacatttggcgtgctttcaggcgtaacgtgaaaaaggaaatatcttcccataaaaaccagacagaagcattctcagaaacttgttcgtgatgtgtgccctctactgacagagttgaacctttctttgcaaagagcagctttgaaacacactttttgtagaatctgcatgaggatatttggatagctttgaggatttccttggaaacgggtatgtcttcagataaactctagacagaagcattctcagaaacttctttgggatgttgcatgcaagtcacagagtagaacattcccattcataaatcagatttgaaacactctttttgtagtatctggaagtggacatttggagcgctttcaggcctatgttgaaaaaggaaatatcttcccataaaaactagacggaagcattctcagaaacttatttgtgatgtgtttgctcaactaacaggattgaaccatcgttttgaaggagcagttttgaaacactgttttcgtggaatctgcaagtggatatttggctagctttgaggatttcgttggaaacgggattacatataaaaaggagacagcagcattctcagaaacttctttgtgatgtctgcattcaattcacagagttgagcattccctttcatagagcaggttggaaacactctttttgtagtatctggatgaggacatttggagcgctttcaggcatatggtgaaaaaggaaatatcttcccgtaaaaactagacagaagcattctcagaaatttatttgtgatgtgtgccctcaactaacagagttgaacctttcttttgatagagcagttttgaaacactctttttgtaaaatctgcaagaggatatttggatagctttgaggatttcgttgcaaacgggaatggcttcatataaactctagacagaagcattctcagaaacttcgttgggatgtttcgattgaagtcccagtgttgaacattcccttttatagagcaggttggaaacactctttctgcattccctggaagtggacatttggagcgctttcaggacgacggtgaaaatggaaatatcttccaagaaaatctagatagaagcaacgtcagaaacttttctgtgatggatctactcagctaacagagttgaacctttcttttgagagagcagttttgcaacactctttttgtggaatatgcaagtggatattagggcagctttgaggatttcgttggaaacgggaatacatgtaaaaagcagacagcagcattctcagaaacttctttgtgatgtttgcattgaagtcacagagttgaacattccctttgagagagcaggtttgaaacacgccttttgtcatatctggaagtgtccattcggagcgcattcaggcttgtgttgaaaaagaaaatatcctcccataaaaactagacagaagcattctcagaaacttatctgtgatgtatgtactcaactaaccgaactaaaccgtcgttttgaaggagcagttttgaaacactctttttgcggaatctgcaagtggatatttggctagctgggaggatttcgttggaaacgggattacatacaaaaagcagacagcagcattctcagaaacttctttgtgatgtttgcattcaagtcacagagttgaacattccctttcatagagcaggtttgaaacactctttttgtagtatctggatgtggacatttggatcgctttcaggcctatggtgaaaaaggaaatatcttcccatgaaaactagacagaagcattctcagaaacttatttgtgatgtgtgccctcaactgacagtgttgaacctttgttttgatagagcagttctgaaacacactttttgtaaaatctgcaagaggatatttggatagctttgaggatttcgttggaaacgggaatgtcttcatgtaaactctacacagaagcattctcagaaactgctttgggatgtttcaattgaagtcccagtgttgaacattccctttcatagagcaggtttgaaaccctctttttgtactatctggaagtggacttttggagccctttcaggtctacggtgaaaaaggagatatcttccaataaaaactagatagaagcaatgtcagaacttttttcatgatgtatctactcagcaaacagagttgaacctttcttttgagagagcagttttgaaacactccttttgtggaatatgcaagtgggtattaggccagcttggaggatttcgttggaaacgggaatacgtataaaaagcagacagcagcattgtcagaaactactttgtgatgtttgcattcaagtcacagaattgaacactccctttcacagagcaggtttgaaactctctttttgtagtgtctataagtgaacatttggcgtgctttcaggcgtaacgtgaaaaaggaaatatcttcccataaaaactagacagaagcattctcagaaacttgttcttgatgtgtgccctctactgacagagttgaacctttctttgcaaagagcagttttgaaacactctttttgtagaatctgcaagaggatatttggatagctttgaggatttcttgggaaacgggaatgtcttcagataaactctagacagaagcattctcagaaacttctttgggatgtttcaattcaagtcacagtgttgaacattccctttcacagagcaggtttgaaacactctttttgtagtgtctataagtgaacatttggcgtgctttcaggcgtaacgtgaaaaaggaaatatcttcccataaaaactagacagaagcattctcagaaacttgttcttgatgtgtcccctctactgacagagttgaacctttctttgcaaagagcagctttgaaacactctttttgtagaatctgcaagaggatatttggatagctttgaggatttcgttggaaacgggtatgtcttcagataaactctagacagaagcattctcagaaacttctttgggatgttgcattcaagtcacagagtagaacattcccattcatagagcagatttgaaacactctttttgtagtatctggaagtggacatttggagcgctttcaggcctatgttgaaaaaggaaatatcttcccataaaaactagacggaagcattctcagaaacttatttgtgatgtgtttgctcaactaacaggattgaaccatcgttttgaaggagcagttttgaaacactgttttcgtggaatctgcaagtggatatttggctagctttgaggatttcgttggaaacgggattacatataaaaaggagacagcagcattctcagaaacttctttgtgatgtctgcattcaattcacagagttgagcattccctttcatagagcaggttggaaacactctttttgtagtatctggatgaggacatttggagcgctttcaggcgtatggtgaaaaaggaaatatcttcccgtaaaaactagacagaagcattctcagaagtttatttgtgatgtgtgccctcaactaacagagttgaacctttcttttgatagagcagttttgaaacactctttttgtaaaatctgcaagaggatatttggatagctttgaggatttcgttgcaaacgggaatggcttcatataaactctagacagaagcattctcagaaacttcgttgggatgtttcgattgaagtcccagtgttgaacattcccttttatagagcaggttggaaacactctttctgcattccctggaagtggacatttggagcgctttcaggacgacggtgaaaatggaaatatcttccaagaaaatctagatagaagcaatgtcagaaacttttatgtgatggatctactcagctaacagagttgaacctttcttttgagagagcagttttgcaacactctttttgtggaatatgcaagtggatattagggcagctttgaggatttcgttggaaacgggaatacatgtaaaaagcagacagcagcattctcagaaacttctttgtgatgtttgcattgaagtcacagagttgaacattccctttgagagagcaggtttgaaacacgccttttgtcatatctggaagtgtccattcggagcgcattcaggcttgtgttgaaaaaggaaatatcctcccataaaaactagacagaagcattctcagaaacttatctgtgatgtatgtactcaactaacagaactaaaccatcgttttgaaggagcagttttgaaacactctttttgcggaatctgcaagtggatatttggctagctgggaggatttcgttggaaacgggattacatacaaaaagcagagagcagcattctcagaaacttctttgtgatgtttgcattcaagtcacagagttgaacattccctttcatagagcaggtttgaaacactctttttgtagtatctggatgtggacatttggatcgctttcaggcctatggtgaaaaaggaaatatcttcccatgaaaactagacagaagcattctcagaaacttatttgtgatgtgtgccctcaactgacagtgttgaacctttgttttgatagagcagttctgaaacacactttttgtaaaatctgcaagaggatatttggatagctttgaggatttcgttggaaacgggaatgtcttcatgtaaactctagacagaagcattctcagaaactgctttgggatgtttcaattgaagtcccagtgttgaacattccctttcatagagcaggtttgaaacactctttttgtactatctggaagtggacatttggagcgctttcaggtctacggtgaaaaaggagatatcttccaataaaaactagatagaagcaatgtcagaacttttttcattatgtatctactcagcaaacagagttgaacctttcttttgagagagcagttttgaaacactctttttgtggaatatgcaagtgggtattaggccagcttggaggatttcgttggaaacgggaatacgtataaaaagcagacagcagcattgtcagaaactactttgtgatgtttgcattcaagtcacagtattgaacactccctttcagagagcaggtttgaaacaatctttttgtagtgtctgtaagtgaacatttggattgctttcaggcctaaggtgaaaaaggaaatatcttcccataaaaactagacagaagcattctcagaaacttgtttgtgatgtgtgccctctactgacagagttgaacctttctttgcaaagagcagttttgaaacactctttttgtagaatctgcaagaggatatttggatagctttgaggatttcttgggaaacgggaatgtcttcagataaactctagacagaagcattctcagaaacttctttgggatgtttcaattgaagtcacagtgttgaacattccctttcacagagcaggtttgaaacactctttttgtagtgtctataagtgaacatttggcgtgctttcaggcgtaacgtgaaaaaggaaatatcttcccataaaaactagacagaagcattctcagaaacttgttcgtgatgtgtgccctctactgacagagttgaacctttctttgcaaagagcagctttgaaacacactttttgtagaatctgcaagaggatatttggatagcttggaggatttcgttggaaacgggtatgtcttcagataaactctagacagaagcattctcagaaacttctttgggatgttgcatgcaagtcacagagtagaacattcccattcatagagcagatttgaaacactctttttgtagtatctggaagtggacatttggagcgctttcaggcctatgttgaaaaaggaaatatcttcccataaaaactagacggaagcattctcagaaacttaattgtgatgtgtttgctcaactaacaggattgaaccatcgttttgaaggagcagttttgaaacactgttttcgtggaatctgcaagtggatatttggctagctttcaggatttcgttggaaacgggattacatataaaaaggagacagcagcattctcagaaacttctttgtgatgtctgcattcaattcacagagttgagcattccctttcatagagcaggttggaaacactctttttgtagtatctggatgaggacatttggagcgctttcaggcgtatggtgaaaagggaaatatcttcccgtaaaaactagacagaagcattctcagaagtttatttgtgatgtgtgccctcaactaacagagttgaacctttcttttgatagagcagttttgaaacactctttttgtaaaatctgcaagaggatatttggatagctttgaggatttcgttgcaaacgggaatggcttcatataaactctagacagaagcattctcagaaacttcgttgggatgtttcgattgaagtcccagtgttgaacattcccttttatagagcaggttggaaacactctttctgcattccctggaagtggacatttggagcgctttcaggacgacggtgaaaatggaaatatcttccaagaaaatctagatagaagcaatgtcagaaacttttatgtgatggatctactcagctaacagagttgaacctttcttttgagagagcagttttgcaacactctttttgtggaatatgcaagtggatattagggcagctttgaggatttcgttggaaacgggaatacatgtaaaaagcagacagcagcattctcagaaacttctttgtgatgtttgcattgaagtcacagagttgaacattccctttgagagagcaggtttgaaacacgccttttgtcatatctggaagtgtccattcggagcgcattcaggcttgtgttgaaaaaggaaatatcctcccataaaaactagacagaagcattctcagaaacttatctgtgatgtatgtactcaactaacagaactaaaccatcgttttgaaggagcaattttgaaacactctttttgcggaatctgcaagtggatatttggctagctgggaggatttcgttggaaacgggattacatacaaaaagcagacagcagcattcttcagaaacttatttgtgatgtgtgccctcaactgacagtgttgaacctttgttttgatagagcagttctgaaacacactttttgtaaaatctgcaagaggatatttggatagctctgaggatttcgttggaaacgggagtgtcttcatgtaaactctagacagaagcattctcagaaactgctttgggatgtttcaattgaagtcccagtgttgaacattcccattcatagagcaggtttgaaacactctttttgtactatctggaagtggacatttggagcgctttcaggtctacggtgaaaaaggagatatcttccaataaaaactagatagaagcaatgtcagaacttttttcatgatgtatctactcagctaacagagttgaacctttcttttgagagagcagttttgaaacactctttttgtggaatatgcaagtgggtattaggccagcttggaggatttcgttggaaacgggaatacgtataaaaagcagacagcagcattgtcagaaactactttgtgatgtttgcattcaagtcacagaattgaacactccctttcacagagcaggtttgaaacactctttttgtagtgtctgtaagtgaacatatggattgctttcaggcctaaggtgaaaaaggaaatatcttgcccataaaaactagacagaagcattctcagaaacttgtttgtgatgtgtgccctctactgacagagttgaacctttctttgcaaagagcagttttgaaacactctttttgtagaatctgcaagaggatatttggatagctttgaggatttcttgggaaacgggaatgtcttcagataaactctagacagaagcattctcagaaacttctttgggatatttcaattgaagtcacagtgttgaacattccctttcacagagcaggtttgaaacactctttttgtagtgtctataagtgaacatttggcgtgctttcaggcctaacgtgaaaaaggaaatatcttcccataaaaactagacagaagcattctcagaaacttgttcgtgatgtgtgccctctactgacagagttgaacctttctttgcaaagagcagctttgaaacactctttttgtagaatctgcaagaggatatttggatagctttgaggatttcgttggaaacgggtatgtcttcagataaactctagacagaagcattctcagaaacttctttgggatgttgcattcaagtcacagagtagaacattcccattcatagagcagatttgaaacactctttttgtagtatctggaagtggacatttggagcgctttcaggcgtatgttgaaaaaggaaatatcttcccataaaaactagacggaagcattctcagaaacttacttgtgatgtgtttgctcaactaacagaattgaaccatcgttttgaaggagcagttttgaaacactgttttcgtggaatctgcaagtggatatttggctagctttgaggatttcgttggaaacgggattacatataaaaaggagacagcagcattctcagaaacttctttgtgatgtctgcattcaattcacagagttgagcattccctttcatagagccggttggaaacactctttttgtagtatctggatgaggacatttggagcgctttcaggcgtatggtgaaaaaggaaatatcttcccgtaaaaactagacagaagcattctcagaaatttatttgtgatgtgtgccctcaactaacagagttgaacctttcttttgatagagcagttttgaaacactctttttgtaaaatctgcaagaggatatttggatagctttgaggatttcgttgcaaacgggaatggcttcatataaactctagacagaagcattctcagaaacttcgttgggatgtttcgattgaagtcccagtgttgaacattcccttttatagagcaggttggaaacactctttctgcattccctggaagtggacatttggagcgctttcaggacgacggtgaaaatggaaatatcttccaagcaaaatctagatagaagcaatgtcagaaacttttatgtgatggatctactcagctaacagagttgaacctttcttttgagagagcagttttgcaacactctttttgtggaatatgcaagtggatattagggcagctttgaggatttcgttggaaacgggaatacatgtaaaaagcagacagcagcattctcagaaacttctttgtgatgtttgcattgaagtcacagagttgaacattccctttgagagagcaggtttgaaacacgccttttgtcatatctggaagtgtccattcggagcgcattcaggcttgtgttgaaaaaggaaatatcctcccataaaaactagacagaagcattctcagaaacttatctgtgatgtatgtactcaactaacagaactaaaccatcgttttgaaggagcagttttgaaacactctttttgcggaatctgcaagtggatatttggctagctgggaggatttcgttggaaacgggattacatacaaaaagcagacagcagcattctcagaaacttctttgtgatgtttgcattcaagtcacagagttgaacattccctttcatagagcaggtttgaaacactctttttgtagtatctggatgtggacatttggatcgctttcaggcctatggtgaaaaaggaaatatcttcccatgaaaactagacagaagcattctcagaaacttatttgtgatgtgtgccctcaactgacagtgttgaacctttgttttgatagagcagttctgaaacacactttttgtaaaatctgcaagaggatatttggatagctttgaggatttcgttggaaacgggaatgtcttcatgtaaactctacacagaagcattctcagaaactgctttgggatgtttcaattgaagtcccagtgttgaacattcccattcatagagcaggtttgaaacactctttttgtactatctggaagtggacatttggagcgctttcaggtctacggtgaaaaaggagatatcttccaataaaaactagatagaagcaatgtcagaacttttttcatgatgtatctactcagctaacagagttgaacctttcttttgagagagcagttttgaaacactctttgtgtggaatatgcaagtgggtattaggccagcttggaggatttcgttggaaacgggaatacgtataaaaagcagacagcagcattgtcagaaactactttgtgatgtttgcattcaagtcacagaattgaacactccctttcacagagcaggtttgaaacactctttttgtagtgtctgtaagtgaacatatggattgctttcaggcctaaggtgaaaaaggaaatatcttcccataaaaactagacagaagcattctcagaaacttgtttgtgatgtgtgccctctactgacagagttgaacctttctttgcaaagaccagttttgaaacactctttttgtagaatctgcaagaggatatttggatagctttgaggatttcttgggaaacgggaatgtcttcagataaactctagacagaagcattctcagaaacttctttgggatgtttcaattgaagtcacagtgttgaacattccctttcacagagcaggtttgaaacactctttttgtagtgtctataagtgaacatttggcgtgctttcaggcctaacgtgaaaaaggaaatatcttcccataaaaactagacagaagcattctcagaaacttgttcgtgatgtgtgccctctactgacagagttgaacctttctttgcaaagagcagctttgaaacacactttttgtagaatctgcaagaggatattttaatagctttgaggatttcgttggaaacgggtatgtcttcagataaactctagacagaagcattctcagaaacttctttgggatgttgcattcaagtcacagagtagaacattcccattcatagagcagatttgaaacactctttttgtagtatctggaagtggacatttggagcgctttcaggcctatgttgaaaaaggaaatatcttcccataaaaactagacggaagcattctcagaaacttatttgtgatgtgtttgctcaactaacaggattgaaccatcgttttgaaggagcagttttgaaacactgttttcgtggaatctgcaagtggatatttggctagctttgaggatttcgttggaaacgggattacatataaaaaggagacagcagcattctcagaaacttctttgtgatgtctgcattcaattcacagagttgagcattccctttcatagagcaggttggaaacactctttttgtagtatctggatgtggacatttggatcgctttcaggcctatggtgaaaaaggaaatatcttcccatgaaaactagacagaagcattctcagaaacttatttgtgatgtgtgcactcaactgacagtgttgaacctttgttttgatagagcagttctgaaacacaatttttgtaaaatctgcaagaggatatttggataggtttgaggatttcgttggaaacgggaatgtcttcatgtaaactctagacagaagcattctcagaaactgctttgggatgtttcaattgaagtcccagtgttgaacattcccattcatagagcaggtttgaaacactctttttgtactatctggaagtggacatttggagcgctttcaggtctacggtgaaaaaggagatatcttccaataaaaactagatagaagcaatgtcagaacttttttcatgatgtatctactcagcaaacagagttgaacctttcttttgagagagcagttttgaaacactctttttgtggaatatgaaagtgggtattaggccagcttggaggatttcgttggaaacgggaatacgtataaaaagcagacagcagcattgtcagaaactactttgtgatgtttgcattcaagtcacagaactgaacactccctttcacagagcaggtttgaaacactctttttgtagtgtctgtaagtgaacatttggattgctttcaggcctaaggtgaaaaaggaaatatcttcccataaaaactagacagaagcattctcagaaacttgtttgtgatgtgtgccctctactgacagagttgaacctttctttgcaaagagcagttttgaaacactctttttgtagaatctgcaagaggatatttggatagctttgaggatttcttgggaaacgggaatgtcttcagataaactctagacagaagcattctcagaaacttctttgggatgtttcaattgaagtcacagtgttgaacattccctttcacagagcaggtttgaaacactctttttgtagtgtctataattgaacatttggcgtgctttcaggcctaacgtgaaaaaggaaatatcttcccataaaaactagacagaagcattctcagaaacttgttcgtgatgtgtgccctctactgacagagttgaacctttctttgcaaagagcagctttgaaacactctttttgtagaatctgcaagaggatatttggatagctttgaggatttcgttggaaacgggtatgtcttcagataaactctagacagaagcattctcagaaacttctttgggatgttgcattcaagtcacagagtagaacattcccattcatagagcagatttgaaacactctttttgtagtatctggaagtggacatttggagcgctttcaggcctatgttgaaaaaggaaatatcttcccataaaaactagacggaagcattctcagaaacttacttgtgatgtgtttgctcaactaacagaattgaaccatcgttttgaaggagcagttttgaaacactgttttcgtggaatctgcaagtggatatttggctagctttgaggatttcgttggaaacgggattacatataaaaaggagacagcagcattctcagaaacttctttgtgatgtctgcattcaagtcacagagttgagcattccctttcatagagcaggttggaaacactctttttgtagtatctggatgaggacatttggagcgctttcaggcgtatggtgaaaaaggaaatatcttcccgtaaaaactagacagaagcattctcagaaatttatttgtgatgtgtgccctcaactaacagagttgaacctttcttttgatagagcagttttgaaacactctttttgtaaaatctgcaagaggatatttggatagctttgaggatttcattgcaaacgggaatggcttcatataaactctagacagaagcattctcagaaacttcgttgggatgtttcgattgaagtcccagtgttgaacattcccttttatagagcaggttggaaacactctttctgcattccctggaagtggacatttggagcgctttcaggacgacggtgaaaatggaaatatcttccaagaaaatctagatagaagcaacgtcagaaacttttatgtgatggatctactcagctaacagagttgaacctttcttttgagagagcagttttgcaacactctttttgtggaatatgcaagtggatattagggcagctttgaggatttcgttggaaacgggaatacatgtaaaaagcagacagcagcattctcagaaacttctttgtgatgtttgcattgaagtcacagagttgaacattccctttgagagagcaggtttgaaacacgccttttgtcatatctggaagtgtccattcggagcgcattcaggcttgtgttgaaaaaggaaatatcctcccataaaaactagacagaagcattctcagaaacttatctgtgatgtatgtactcaactaacagaactaaaccatcgttttgaaggagcagttttgaaacactctttttgcggaatctgcaagtggatatttggctagctgggaggatttccgttggaaacgggattacatacaaaaagcagacagcagcattctcagaaacttctttgtgatgtttgcattcaagtcgcagagttgaacattccctttcatagagcaggtttgaaacactctttttgtagtatctggatgtggacatttggatcgctttcaggcctatggtgaaaaaggaaatatcttcccatgaaaactagacagaagcattctcagaaacttatttgtgatgtgtgccctcaactgacagtgttgaacctttgttttgatagagcagttctgaaacacactttttgtaaaatctgcaagaggatatttggatagctttgaggatttcgttggaaacgggaatgtcttcatgtaaactctagacagaagcattctcagaaactgctttgggatgtttcaattgaagtcccagtgttgaacattccctttcatagagcaggtttgaaacactctttttgtagtatctggaagtggacatttggagcgctttcaggtctacggtgaaaagggagatatcttccaataaaaactagatagaagcaatgtcagaacttttttcatgatgtatctactcagcaaacagagttgaagctttcttttgagagagcagttttgaaacactctttttgtggaatatgcaagtgggtattaggccagcttggaggatttcgttggaaacgggaatacgtataaaaagcagacagcagcattgtcagaaactactttgtgatgtttgcattcaagtcacagaattgaacactccctttcacagagcaggtttgaaacactctttttgtagtgtctgtaagtgaacatttggattgctttcaggcctaaggtgaaaaaggaaatatcttcccataaaaactagacagaagcattctcagaaagtagtttgtgatgtgtgccctctactgacagagttgaacctttctttgcaaagagcagttttgaaacactctttttgtagaatctgcaagaggatatttggatagctttgaggatttcttgggaaacgggaatgtcttcagataaactctagacagaagcattctcagaaacttctttgggatgtttcaattgaagtcacagtgttgaacattccctttcacagagcaggtttgaaacactctttttgtagtgtctataagtgaacatttggcgtgctttcaggcctaacgtgaaaaaggaaatatcttcccataaaaactagacagaagcattctcagaaacttgtttgtgatgtgtgccctctactgacagagttgaacctttctttgcaaagagcagctttgaaacactctttttgtagaatctgcaagaggatatttggatagcttggaggatttcgttggaaacgggtatgtcttcagataaactctagacagaagcattctcagaaacttctttgggatgttgcattcaagtcacagagtagaacattcccattcatagagcagatttgaaacactctttttgtagtatctggaagtggacatttggagcgctttcaggcctatgttgaaaaaggaaatatcttcccataaaaactagacggaagcattctcagaaacttatttgtgatgtgtttgctcaactaacaggattgaaccatcgttttgaaggagcagttttgaaacactgttttcgtggaatctgcaagtggatatttggctagctttgaggatttcgttggaaacgggattacatataaaaaggagacagcagcattctcagaaacttctttgtgatgtctgcattcaagtcacagagttgagcattccctttcatagagcaggttggaaacactctttttgtagtatctggatgaggacatttggagcgctttcaggcctatggtgaaaaaagaaatatcttcccgtaaaaactagacagaagcattctcagaaatttatttgtgatgtgtgccctcaactaacagagttgaacctttcttttgatagagcagttttgaaacactctttttgtaaaatctgcaagaggatatttggatagctttgaggatttcgttgcaaacgggaatggcttcatataaactctagacagaagcattctcagaaacttcgttgggatgtttcgattgaagtcccagtgttgaacattcccttttatagagcaggttggaaacactctttctgcattccctggaagtggacatttggagcgctttcaggacgacggtgaaaatggaaatatcttccaagaaaatctagatagaagcaatgtcagaaacttttatgtgatggatctactcagctaacagagttgaacctttcttttgagagagcagttttgcaacactctttttgtggaatatgcaagtggatattagggcagctttgaggatttcgttggaaacgggaatacatgtaaaaagcagacagcagcattctcagaaacttctttgtgatgtttgcattgaagtcacagagttgaacattccctttgagagagcaggtttgaaacacgccttttgtcatatctggaagtgtccattcggagcgcattcaggcttgtgttgaaaaaggaaatatcctcccataaaaactagacagaagcattctcagaaacttatctgtgatgtatgtactcaactaacagaactaaaccatcgttttgaaggagcagttttgaaacactctttttgcggaatatgcaagtggatatttggctagcttggaggatttcgttggaaacgggatgacatacaaaaagcagagagcagcattctcagaaacttctttgtgatgtttgcattcaagtcacagagttgaacattccctttcatagagcaggtttgaaacactctttttgtagtatctggatgtggacatttggatcgctttcaggcctatggtgaaaaaggaaatatcttcccatgaaaactagacagaagcattctcagaaacttgtttgtgatgtgtgccctctactgacagagttgaacctttctttgcaaagagcagttctgaaacactctttttgtagaatctgcaagaggatatttggatagctttgaggatttcttgggaaacgggaatgtcttcatgtaaactctggacagaagcattctcagaaactgctttgggatgtttcaattgaagtcccagtgttgaacattccctttcatagagcaggtttgaaacactctttttgtactatctggaagtggacatttggagcgctttcaggtctacggtgaaaaaggagatatcttccaataaaaactagatagaagcaatgtcagaacttttttcatgatgtatctactcagcaaacagagttgaacctttcttttgagagagcagttttgaaacactccttttgtggaatatgcaagtgggtattaggccagcttggaggatttcgttggaaacgggaatacgtataaaaagcagacagcagcattgtcagaaactactttgtgatgtttgcattcaagtcacagaattgaacactccctttcacagagcaggtttgaaacactctttttgtagtgtctgtaagtgaacatttggattgctttcaggcctaaggtgaaaaaggaaatatcttcccataaaaactagacagaagcattctcagaaacttgtttgtgatgtgtgccctctactgacagagttgaacctttctttgcaaagagcagttttgaaacactctttttgtagaatctgcaagaggatatttggatagctttgaggatttcttgggaaacgggaatgtcttcagataaactctagacagaagcattttcagaaacttcttgggatatttcaattgaagtcacagtgttcaacattccctttcacagagcaggtttgaaacactctttttgtagtgtctataagtgaacatttggcgtgctttcaggcctaacgtgaaaaaggaaatatcttcccataaaaactagacagaagcattctcagaaacttgttcgtgatgtgtgccctctactgacagagttgaacctttctttgcaaagagcagctttgaaacactctttttgtagaatctgcaagaggatatttggatagctttgaggatttcgttggaaacgggtatgtcttcagataaactctagacagaagcattctcagaaacttctttgggatgttgcattcaagtcacagagtagaacattcccattcatagagcagatttgaaacactctttttgtagtatctggaagtggacatttggagcgctttcaggcctatgttgaaaaaggaaatatcttcccataaaaactagacggaagcattctcagaaacttatttgtgatgtgtttgctcaactaacaggattgaaccatcgttttgaaggagcagttttgaaacactgttttcgtggaatctgcaagtggatatttggctagctttgaggatttcgttggaaacgggattacatataaaaaggagacagcagcattctcagaaacttctttgtgatgtctgcattcaattcacagagttgagcattccctttcatagagcaggttggaaacactctttttgtagtatctggatgaggacatttggagcgctttcaggcgtatggtgaaaaaggaaatatcttcccgtaaaaactagacagaagcattctcagaagtttatttgtgatgtgtgccctcagctaacagagttgaacctttcttttgatagagcagttttgaaacactctttttgtaaaatctgcaagaggatatttggatagctttgaggatttcgttgcaaacgggaatggcttcatataaactctagacagaagcattctcagaaacttcgttgggatgtttcgattgaagtcccagtgttgaacattcccttttatagagcaggttggaaacactctttctgcattccctggaagtggacatttggagcgctttcaggacgacggtgaaaatggaaatatcttccaagaaaatctagatagaagcaatgtcagaaacttttatgtgatggatctactcagctaacagagttgaacctttcttttgagagagcagttttgcaacactctttttgtggaatatgcaagtggatattagggcagctttgaggatttcgttggaaacgggaatacatgtaaaaagcagacagcagcattctcagaaacttctttgtgatgtttgcattgaagtcacagcagttgaacattccctttgagagagcaggtttgaaacacgccttttgtcatatctggaagtgtccattcggagcgcattcaggcttgtgttgaaaaaggaaatatcctcccataaaaactagacagaagcattctcagaaacttatctgtgatgtatgtactcaactaacagaactaaaccatcgttttgaaggagcagttttgaaacactctttttgcggaatctgcaagtggatatttggctagctgggaggatttcgttggaaacgggattacatacaaaaagcagacagcagcattctcagaaacttctttgtgatgtttgcattcaagtcacagagttgaacattccctttcatagagcaggtttgaaacactctttttgtagtatctggatgtggacatttggatcgctttcaggcctatggtgaaaaaggaaatatcttcccatgaaaactagacagaagcattctcagaaacttatttgtgatgtgtgccctcaactgacagtgttgaacctttgttttgatagagcagttctgaaacacactttttgtaaaatctgcaagaggatatttggatagctttgaggatttcgttggaaacgggaatgtcttcatgtaaactctagacagaagcattctcagaaactgctttgggatgtttcaattgaagtcccagtgttgaacattccctttcatagagcaggtttgaaacactctttttgtactatctggaagtggacatttggagcgctttcaggtctacggtgaaaaaggagatatcttccaataaaaactagatagaagcaatgtcagaacttttttcatgatgtatctactcagcaaacagagttgaacctttcttttgagggagcagttttgaaacactatttttgtggaatatgcaagtgggtattaggccagcttggaggatttcgttggaaacgggaatacgtataaaaagcagacagcagcattgtcagaaactactttgtgatgtttgcattcaagtcacagaattgaacactccctttcacagagcaggtttgaaactctctttttgtagtgtctataagtgaacatttggcgtgctttcaggcgtaacgtgaaaaaggaaatatcttcccataaaaactagacagaagcattctcagaaacttgttcgtgatgtgtgccctctactgacagagttgaacctttctttgcaaagagcagttttgaaacactctttttgtagaatctgcaagaggatatttggatagctttgaggatttcttgggaaacgggaatgtcttcagataaactctagacagaagcattctcagaaacttctttgggatgtttcaattgaagtcacagtgttgaacattccctttcacagagcaggtttgaaacactctttttgtagtgtctataagtgaacatttggcgtgctttcaggcctaacgtgaaaaaggaaatatcttcccataaaaactagacagaagcattctcagaaacttgttcatgatgtgtgccctctactgacagagttgaacctttctttgcaaagagcagctttgaaacactcttttggtagaatctgcaagaggatatttggatagctttgaggatttcgttggaaacgggtatgtcttcagataaactctagacagaagcattctcagaaacttctttgggatgttgcattcaagtcacagagtagaacattcccattcatagagcagatttgaaacactctttttgtagtatctggaagtggacatttggagcgctttcaggcctatgttgaaaaaggaaatatcttcccataaaaactagacggaagcattctcagaaacttatttgtgatgtgtttgctcaactaacaggattgaaccatcgttttgaaggagcagttttgaaacactgttttcgtggaatctgcaagtggatatttggctagctttgaggatttcgttggaaacgggattacatatacaaaggagacagcagcattctcagaaacttctttgtgatgtctgcattcaattcacagagttgagcattccctttcatagagcaggttggaaacactctttttgtagtatctggatgaggacatttggagcgctttcaggcgtatggtgaaaaaggaaatatcttcccgtaaaaactagacagaagcattctcagaagtttatttgtgatgtgtgccctcaactaacagagttgaacctttcttttgatagagcagttttgaaacactctttttgtaaaatctgcaagaggatatttggatagctttgaggatttcgttgcaaacgggaatggcttcatataaactctagacagaagcattctcagaaacttcgttgggatgtttcgattgaagtcccagtgttgaacattcccttttatagagcaggttggaaacactctttctgcattccctggaagtggacatttggagcgctttcaggacgacggtgaaaatggaaatatcttccaagaaaatctagatagaagcaacgtcagaaacttttatgtgatggatctactcagctaacagagttgaacctttcttttgagagagcagttttgcaacactctttttgtggaatatgcaagtggatattagggcagctttgaggatttcgttggaaacgggaatacatgtaaaaagcagacagcagcattctcagaaacttctttgtgatgtttgcattgaagtcacagcagttgaacattccctttgagagagcaggtttgaaacacgccttttgtcatatctggaagtgtccattcggagcgcattcaggcttgtgttgaaaaaggaaatatcctcccataaaaactagacagaagcattctcagaaacttatctgtgatgtatgtactcaactaacagaactaaaccatcgttttgaaggagcagttttgaaacactctttttgcggaatctgcaagtggatatttggctagctgggaggatttcgttggaaacgggattacatacaaaaagcagacagcagcattctcagaaacttctttgtgatgtttgcattcaagtcacagagttgaacattccctttcatagagcaggtttgaaacactctttttgtagtatctggatgtggacatttggatcgctttcaggcctatggtgaaaaaggaaatatcttcccatgaaaactagacagaagcattctcagaaacttatttgtgatgtgtgccctcaactgacagtgttgaacctttgttttgatagagcagttctgaaacacactttttgtaaaatctgcaagaggatatttggatagctttgaggatttcgttggaaacgggaatgtcttcatgtaaactctagacagaagcattctcagaaactgctttgggatgtttcaattgaagtcccagtgttgaacattccctttcatagagcaggtttgaaacactctttttgtactatctggaagtggacatttggagcgctttcaggtctacggtgaaaaaggagatatcttccaataaaaactagatagaagcaatgtcagaacttttttcatgatgtatctactcagcaaacagagttgaacctttcttttgagagagcagttttgaaacactctttttgtggaatatgcaagtgggtattaggccagcttggaggatttcgttggaaacgggaatacgtataaaaagcagacagcagcattgtcagaaactactttgtgatgtttgcattcaagtcacagaattgaacactccctttcacagagcaggtttgaaacactctttttgtagtgtctgtaagtgaacatttggattgctttcaggcctaaggtgaaaaaggaaatatcttcccataaaaactagacagaagcattctcagaaacttgtttgtgatgtgtgccctctactgacagagttgaacctttctttgcaaagagcagttttgaaacactctttttgtagaatctgcaagaggatatttggatagctttgaggatttcttgggaaacgggaatgtcttcagataaactctagacagaagcattctcagaaacttctttgggatgtttcaattgaagtcacagtgttgaacattccctttcacagagcaggtttgaaacactctttttgtagtgtctataagtgaacatttggcgtgttttcaggcctaacgtgaaaaaggaaatatcttcccataaaaactagacagaagcattctcagaaacttgttcgtgatgtgtgccctctactgacagagttgaacctttctttgcaaagagcagctttgaaacactctttttgtagaatctgcaagaggatatttggatagcttggaggatttcgttggaaacgggtatgtcttcagataaactctagacagaagcattctcagaaacttctttgggatgttgcattcaagtcacagagtagaacattcccattcatagagcagatttgaaacactctttttgtagtatctggaagtggacatttggagcgctttcaggcctatgttgaaaaaggaaatatcttcccataaaaactagacggaagcattctcagaaacttatttgtgatgtgtttgctcaactaacaggattgaaccatcgttttgaaggagcagttttgaaacactgttttcgtggaatctgcaagtggatatttggctagctttgaggatttcgttggaaacgggattacatataaaaaggagacagcagcattctcagaaacttctttgtgatgtctgcattcaattcacagagttgggcattccctttcatagagcaggttggaaacactctttttgtagtatctggatgaggacatttggagcgctttcaggcgtatggtgaaaaaggaaatatcttcccgtaaaaactagacagaagcattctcagaagtttatttgtgatgtgtgccctcaactaacagagttgaacctttcttttgatagagcagttttgaaacactctttttgtaaaatctgcaagaggatatttggatagctttgaggatttcgttgcaaacgggaatggcttcatataaactctagacagaagcattctcagaaacttcgttgggatgtttcgattgaagtcccagtgttgaacattcccttttatagagcaggttggaaacactctttctgcattccctggaagtggacatttggagcgctttcaggacgacggtgaaaatggaaatatcttccaagaaaatctagatagaagcaatgtcagaaacttttatgtgatggatctactcagctaacagagttgaacctttcttttgagagagcagttttgcaacactctttttgtggaatatgcaagtggatattagggcagctttgaggatttcgttggaaacgggaatacatgtaaaaagcagacagcagcattctcagaaacttctttgtgatgtttgcattgaagtcacagagttgaacattccctttgagagagcaggtttgaaacacgccttttgtcatatctggaagtgtccattcggagcgcattcaggcttgtgttgaaaaaggaaatatcctcccataaaaactagacagaagcattctcagaaacttatctgtgatgtatgtactcaactaacagaactaaaccatcgttttgaaggagcagttttgaaacactctttttgcggaatctgcaagtggatatttggctagctgggaggatttcgttggaaacgggattacatacaaaaagcagacagcagcattctcagaaacttctttgtgatgtttgcattcaagtcacagagttgaacattccctttcatagagcaggtttgaaacactctttttgtagtatctggatgtggacatttggatcgctttcaggcctatggtgaaaaaggaaatatcttcccatgaaaactagacagaagcattctcagaaacttatttgtgaggtgtgccctcaactgacagtgttgaacctttgttttgatagagcagttctgaaacacaccttttgtaaaatctgcaagaggatatttggatagctttgaggatttcgttggaaacgggaatgtcttcatgtaaactctagacagaagcattctcagaaactgctttgggatgtttcaattgaagtcccagtgttgaacattccctttcatagagcaggtttgaaacactctttttgtactatctggaagtggacatttggagcgctttcaggtctacggtgaaaaaggagatatcttccaataaaaactagatagaagcaatgtcagaacttttttcatgatgtatctactcagcaaacagagttgaacctttcttttgagagagcagttttgaaacactctttttgtggaatatgcaagtgggtattaggccagcttggaggatttcgttggaaacgggaatacgtataaaaagcagacagcagcattgtcagaaactactttgtgatgtttacattcaagtcacagaattgaacactccctttcacagaacaggtttgaaacactctttttgtagtgtctgtaagtgaacatttggattgctttcaggcctaaggtgaaaaaggaaatatcttcccataaaaactagacagaagcattctcagaaacttgtttgtgatgtgtgccctctactgacagagttgaacctttctttgcaaagagcagttttgaaacactctttttgtagaatctgcaagaggatatttggatagctttgaggatttcttgggaaacgggaatgtcttcagataaactctagacagaagcattctcagaaacttctttgggatgtttcaattgaagtcacagtgttgaacattccctttcacagagcaggtttgaaacactctttttgtagtgtctataagtgaacatttggcgtgctttcaggcctaacgtgaaaaaggaaatatcttcccataaaaactagacagaagcattctcagaaacttgttcgtgatgtgtgccctctactgatagagttgaacctttctttgcaaagagcagctttgaaacacactttttgtagaatctgcaagaggatatttggatagctttgaggatttcgttggaaacgggtatgtcttcagataaactctagacagaagcattctcagaaacttctttgggatgttgcattcaagtcacagagtagaacattcccattcatagagcagatttgaaacactctttttgtagtatctggaagtggacatttggagcgctttcaggcctatgttgaaaaaggaaatatcttcccataaaaactagacggaagcattctcagaaacttacttgtgatgtgttttctcaactaacagaattgaaccatcgttttgaaggagcagttttgaaacactgttttcgtggaatctgcaagtggatatttggctagctttgaggatttcgttggaaacgggattacatataaaaaggagacagcagcattctcagaaacttctttgtgatgtctgcattcaattcacagagttgagcattccctttcatagagcaggttggaaacactctttttgtagtatctggatgaggacatttggagcgctttcaggcgtatggtgaaaaaggaaatatcttcccgtaaaaactagacagaagcattctcagaagtttatttctgatgtgtgccctcaactaacagagttgaaactttcttttgatagagcagttttgaaacactctttttgtaaaatctgcaagaggatatttggatagctttgaggatttcgttgcaaacgggaatggcttcatataaactctagacagaagcattctcagaaacttcgttgggatgtttcgattgaagtcccagtgttgaacattcccttttatagagcaggttggaaacactctttctgcattccctggaagtggacatttggagcgctttcaggacgacggtgaaaatggaaatatcttccaagaaaatctagatagaagcaacgtcagaaacttttatgtgatggatctactcagctaacagagttgaacctttcttttgagagagcagttttgcaacactctttttgtggaatatgcaagtggatattagggcagctttgaggatttcgttggaaacgggaatacatgtaaaaagcagacagcagcattctcagaaacttctttgtgatgtttgcattgaagtcacagagttgaacattccctttgagagagcaggtttgaaacacgccttttgtcatatctggaagtgtccattcggagcgcattcaggcttgtgttgaaaaaggaaatatcctcccataaaaactagacagaagcattctcagaaacttatctgtgatgtatgtactcaactaacagaactaaaccatccttttgaaggagcagttttgaaacactctttttgcggaatctgcaagtggatatttggctagctgggaggatttcgttggaaacgggattacatacaaaaagcagacagcagcattctcagaaacttctttgtgatgtttgcattcaagtcacagagttgaacattccctttcatagagcaggtttgaaacactctttttgtagtatctggatgtggacatttggatcgctttcaggcctatggtgaaaaaggaaatatcttcccatgaaaactagacagaagcattctcagaaacttatttgtgatgtgtgccctcaactgacagtgttgaacctttgttttgatagagcagttctgaaacacactttttgtaaaatctgcaagaggatatttggatagctttgaggatttcgttggaaacgggaatgtcttcatgtaaactctacacagaagcattctcagaaactgctttgggatgtttcaattgaagtcccagtgttgaacattcccattcatagagcaggtttgaaacactctttttgtactatctggaagtggacatttggagcgctttcaggtctacggtgaaaaaggagatatcttccaataaaaactagatagaagcaatgtcagaacttttttcatgatgtatctactcagcaaacagagttgaacctttcttttgagagagcagttttgaaacactctttttgtggaatatgcaagtgggtattaggccagcttggaggatttcgttggaaacgggaatacgtataaaaagcagacagcagcattgtcagaaactactttgtgatgtttgcattcaagtcacagaattgaacactccctttcacagagcaggtttgaaacactctttttgtagtgtctataagtgaacatttggcgtgctttcaggcctaaggtgaaaaaggaaatatcttcccataaaaactagacagaagcattctcagaaacttgtttgtgatgtgtgccctctactgacagagttgaacctttctttgcaaagagcagttttgaaacactctttttgtagaatcagcaagaggatatttggatagctttgaggatttcttgggaaacgggaatgtcttcagataaactctagacagaagcattctcagaaacttctttgggatgtttcaattgaagtcacagtgttgaacattccctttcacagagcaggtttgaaacactctttttgtagtgtctataagtgaacatttggcgtgctttcaggcgtaacgtgaaaaaggaaatatcttcccataaaaactagacagaagcattctcagaaacttgttcttgatgtgtcccctctactgacagagttgaacctttctttgcaaagagcagctttgaaacactctttttgtagaatctgcaagaggatatttggatagcttggaggatttcgttggaaacgggtatgtcttcagataaactctagacagaagcattctcagaaacttctttgggatgttgcattcaagtcacagagtagaacattcccattcatagagcagatttgaaacactctttttgtagtatctggaagtggacatttggagcgctttcaggcctatgttgaaaaaggaaatatcttcccataaaaactagacggaagcattctcagaaacttatttgtgatgtgtttgctcaactaacaggattgaaccatcgttttgaaggagcagttttgaaacactgttttcgtggaatctgcaagtggatatttggctagctttgaggatttcgttggaaatgggattacatatacaaaggagacagcagcattctcagaaacttctttgtgatgtctgcattcaattcacagagttgagcattccctttcatagagcaggttggaaacactctttttgtagtatctggatgaggacatttggagcgctttcaggcgtatggtgaaaaaggaaatatcttcccgtaaaaactagacagaagcattctcagaagtttatttgtgatgtgtgccctcaactaacagagttgaacctttcttttgatagagcagttttgaaacactctttttgtaaaatctgcaagaggatatttggatagctttgaggatttcgttgcaaacgggaatggcttcatataaactctagacagaagcattctcagaaacttcgttgggatgtttcgattgaagtcccagtgttgaacattcccttttatagagcaggttggaaacactctttctgcattccctggaagtggacatttggagcgctttcaggacgacggtgaaaatggaaatatcttccaagaaaatctagatagaagcaacgtcagaaacttttatgtgatggatctactcagctaacagagttgaacctttcttttgagagagcagttttgcaacactctttttgtggaatatgcaagtggatattaggacagctttgaggatatcgttggaaacgggaatacatgtaaaaagcagacagccagcattctcagaaacttctttgtgatgtttgcattgaagtcacagagttgaacattccctttgagagagcaggtttgaaacacgccttttgtcatatctggaagtgtccattcggagcgcattcaggcttgtgttgaaaaaggaaatatcctcccataaaaactagacagagcattctcagaaacttatctgtgatgtatgtactcaactaacagaactaaaccatcgttttgaaggagcagttttgaaacactctttttgcggaatctgcaagtggatatttggctagctgggaggatttcgttggaaacgggattacatacaaaaagcagacagcagcattctcagaaacttctttgtgatgtttgcattcaagtcacagagttgaacattccctttcatagagcaggtttgaaacactctttttgtagtatctggatgtggacatttggatcgctttcaggcctatggtgaaaaaggaaatatcttcccatgaaaactagacagaagcattctcagaaacttatttgtgatgtgtgccctcaactgacagtgttgaacctttgttttgatagagcagttctgaaacacactttttgtaaaatctgcaagaggatatttggatagctttgaggatttcgttggaaacgggaatgtcttcatgtaaattctacacagaagcattctcagaaactgctttgggatgtttcaattgaagtcccagtgttgaacattcccattcatagagcaggtttgaaacactctttttgtactatctggaagtggacatttggagcgctttcaggtctacggtgaaaaaggagatatcttccaataaaaactagatagaagcaatgtcagaacttttttcatgatgtatctactcagcaaacagagttgaacctttcttttgagagagcagttttgaaacactctttttgtggaatatgcaagtgggtattaggccagcttggaggatttcgttggaaacgggaatacgtataaaaagcagacagcagcattgtcagaaactactttgtgatgtttgcattcaagtcacagaattgaacactccttttcacagagcaggtttgaaacactctttttgtagtgtctgtaagtgaacatttggattgctttcaggcctaaggtgaaaaaggaaatatcttcacataaaaactagacagaagcattctcagaaacttgtttgtgatgtgtgccctctactgacagagttgaacctttctttgcaaagaccagttttgaaacactctttttgtagaatctgcaagaggatatttggatagctttgaggatttcttgggaaacgggaatgtcttcagataaactctagacagaagcattctcagaaacttctttgggatgtttcaattgaagtcacagtgttgaacattccctttcacagagtaggtatgaaacactctttttgtagtgtctataagtgaacatttggcgtgctttcaggcgtaacgtgaaaaaggaaatatcttcccataaaaactagacagaagcattctcagaaacttgttcgtgatgtgtgccctctactgacagagttgaacctttctttgcaaagagcagctttgaaacactctttttgtagaatctgcaagaggatatttggatagctttgaggatttcgttggaaacgggtatgtcttcagataaactctagacagaagcattctcagaaacttctttgggatgttgcattcaagtcacagagtagaacattcccatgcatagagcagatttgaaacactctttttgtagtatctggaagtggacatttggagcgctttcaggcctatgttgaaaaaggaaatatcttcccataaaaactagacggaagcattctcagaaacttacttgtgatgtgtttgctcaactaacagaattgaaccatcgttttgaaggagcagttttgaaacactgatttcgtggaatctgcaagtggatatttggctagctttgaggatttcgttgcaaacgggattacatataaaaaggagacagcagcattctcagaaacttctttgtgatgtctgcattcaattcacagagttgagcattccctttcatagagcaggttggaaacactctttttgtagtatctggatggggacatttggagcgctttcaggcctatggtgaaaaaggaaatatcttcccgtaaaaactagacagaagcattctcagaagtttatttgtgatgtgtgccctcaactaacagagttgaacctttcttttgatagagcagttttgaaacactctttttgtaaaatctgcaagaggatatttggatagctttgaggatttcgttgcaaacgggaatggcttcatataaactctagacagaagcattctcagaaacttcgttgggatgtttcgattgaagtcccagtgttgaacattcccttttatagagcaggttggaaacactctttctgcattccctggaagtggacatttggagcgctttcaggacgacggtgaaaatggaaatatcttccaagaaaatctagatagaagcaacatcagaaacttttatgtgatggatctactcagctaacagagttgaacctttcttttgagagagcagttttgcaacactctttttgtggaatacgcaagtggatattagggcagctttgaggatttcgttggaaacgggaatacatgtaaaaagcagacagcagcattctcagaaacttctttgtgatgtttgcattgaagtcacagagttgaacattccctttgagagagcaggtttgaaacacgccttttgtcatatctggaagtgtccattcggagcgcattcaggcttgtgttgaaaaaggaaatatcctcccataaaaactagacagaagcattctcagaaacttatctgtgatgtatgtactcaactaacagaactaaaccatcgttttgaaggagcagttttgaaacactctttttgcggaatctgcaagtggatatttggctagctgggaggatttcgttggaaacgggattacatacaaaaagcagacagcagcattctcagaaacttctttgtgatgtttgcattcaagtcacagagttgaacattccctttcatagagcaggtttgaaacactctttttgtagtatctggatgtggacatttggatcgctttcaggcctatggtgaaaaaggaaatatcttcccatgaaaactagacagaagcattctcagaaacttatttgtgatgtgtgccctcaactgacagtgttgaacctttgttttgatagagcagttctgaaacacactttttgtaaaatctgcaagaggatatttggatagctttgaggatttcgttggaaacgggaatgtcttcatgtaaactctagacagaagcattctcagaaactgctttgggatgtttcaattgaagtcccagtgttgaacattcccattcatagagcatgtttgaaacactctttttgtagtatctggaagtggacatttggagggctttcaggtctacggtgaaaaaggagatatcttccaataaaaactagatagaagcaatgtcagaacttttttcatgatgtatctactcagcaaacagagttgaacctttcttttgagagagcagttttgaaacactctttttgtggaatatgcaagtgggtattaggccagcttggaggatttcgttggaaacgggaatacgtataaaaagcagacagcagcattgtcagaaactactttgtgatgtttgcattcaagtcacagaattgaacactccctttcacagagcaggtttgaaacactctttttgtagtgtctgtaagtgaacatttggattgctttcaggcctatggtgaaaaaggaaatatcttcccataaaaactagacagaagcattctcagaaacttgtttgtgatgtgtgccctctactgacagagttgaacctttctttgcaaagagcagttttgaaacactctttttgtagaatctgcaagaggatatttggatagctttgaggatttcttgggaaacgggaatgtcttcagataaactctagacagaagcattctcagaaacttctttgggatgtttcaattgaagtcacagtgttgaacattccctttcacagagcaggtttgaaacactctttttgtagtgtctataagtgaacatttggcgtgctttcaggcctaacgtgaaaaaggaaatatcttcccataaaaactagacagaagcattctcagaaacttgttcgtgatgtgtgacctctacagacagagttgaacctttctttgcaaagagcagctttgaaacacactttttgtagaatctgcaagaggatatttggatagctttgaggatttcgttggaaacgggtatgtcttcagataaactctagacagaagcattctcagaaacttctttgggatgttgcattcaagtcacagagtagaacattcccattcatagagcagatttgaaacactctttttgtagtatctggaagtggacatttggagcgctttcaggcctatgttgaaaaaggaaatatcttcccataaaaactagacggaagcattctcagaaacttatttgtgatgtgtttgctcaactaacaggattgaaccatcgttttgaaggagcagttttgaaacactgttttcgtggaatctgcaagtggatatttggctagctttgaggatttcgttggaaacgggattacatatacaaaggagacagcagcattctcagaaacttctttgtgatgtctgcattcaattcacagagttgagcattccctttcatagagcaggttggaaacactctttttgtagtatctggatgaggacatttggagcgctttcaggcgtatggtgaaaaaggaaatatcttcccgtaaaaactagacagaagcattctcagaaacttatttgtgatgtgtgccctcaactaacagagttgaacctttcttttgatagagcagttttgaaacactctttttgtaaaatctgcaagaggatatttggatagctttgaggatttcgttggaaacgggaatgtcttcatgtaaactctagacagaagcattctcagaaactgctttgggatgtttcaattgaagtcccagtgttgaacattcccattcatagagcaggtttgaaacactctttttgtactatctggaagtggacatttggagcgctttcaggtctacggtgaaaaaggggatatcttccaataaaaactagatagaagcaatgtcagaacttttttcatgatgtatctactcagcaaacagagttgaacctttcttttgagagagcagttttgacacagtctttgtggaatatgcaagtgggtattaggccagcttggaggatttcgttggaaacgggaatacgtataaaaagcagacagcagcattgtcagaaactactttgtgatgtttgcattcaagtcacagaattgaacactcgctttcacagagcaggtttgaaacactctttttgtagtgtctgttactgaacatttggattgctttcaggcctaaggtgaaaaaggaaatatcttcccataaaaagtagacagaagcattctcagaaacttgtttgtgatgtgtgccctctactgacagagttgaacctttctttgcaaagagcagttttgaaacactctttttgtagaatctgcaagaggatatttggatagctttgaggatttcttgggaaacgggaatgtcttcagataaactctagacagaagcattctcagaaacttctttgggatgtttcaattgaagtcacagtgttgaacattccctttcacagagcaggtttgaaacactctttttgtagtgtctataagtgaacatttggcgtgctttcaggcctaacgtgaaaaaggaaatatcttcccataaaaactagacagaagcattctcagaaacttgttcgtgatgtgtgccctctactgacagagttgaacctttctttgcaaagagcagctttgaaacactctttttgtagaatctgcaagaggatatttggatagctttgaggatttcgttggaaacggggatgtcttcagataaactctagacagaagcattctcagaaacttctttgggatgttgcattcaagtcacagagtagaacattcccattcatagagcagatttgaaacactctttttgtagtatctggaagtggacatttggagcgctttcaggcctatgttgaaaaaggaaatatcttcccataaaaactagacggaagcattctcagaaacttatttgtgatgtgtttgctcaactaacaggattgaaccatcgttttgaaggagcagttttgaaacactgttttcgtggaatctgcaagtggatatttggctagctttgaggatttcgttggaaacgggattacatataaaaaggagacagcagcattctcagaaacttctttgtgatgtctgcattcaattcacagagttgagcattccctttcatagagcaggttggaaacactctttttgtagtatctggatgaggacatttggagcgctttcaggcgtatggtgaaaaaggaaatatcttcccgtaaaaactagacagaagcattctcagaagtttatttgtgatgtgtgccctcaactaacagagttgaacctttcttttgatagagcagttttgaaacactctttttgtaaaatctgcaagaggatatttggatagctttgaggatttcgttgcaaacgggaatggcttcatataaactctagacagaagcattctcagaaacttcgttgggatgtttcgattgaagtcccagtgttgaacattcccttttatagagcaggttggaaacactctttctgcattccctggaagtggacatttggagcgctttcaggacgacggtgaaaatggaaatatcttccaagaaaatctagatagaagcaatgtcagaaacttttatgtgatggatctactcagctaacagagttgaagctttcttttgagagagcagttttgccacactctttttgtggaatatgcaagtggatattagggcagctttgaggatttcgttggaaacgggaatacatgtaaaaagcagacagcagcattctcagaaacttctttgtgatgtttgcattgaagtcacagagttgaacattccctttgagagagcaggtttgaaacacgccttttgtcatatctggaagtgtccattcggagcgcattcaggcttgtgttgaaaaaggaaatatcctcccataaaaactagacagaagcattctcagaaacttatctgtgatgtatgtactcaactaacagaactaaaccatcgttttgaaggagcagttttgaaacactctttttgcggaatctgcaagtggatatttggctagctgggaggatttcgttggaaacgggattacatacaaaaagcagacagcagcattctcagaaacttctttgtgatgtttgcattcaagtcacagagttgaacattccctttcatagagcaggtttgaaacactctttttgtagtatctggatgtggacatttggatcgctttcaggcctatggtgaaaaaggaaatatcttcccatgaaaactagacagaagcattctcagaaacttatttgtgatgtgtgccctcaactgacagtgttgaacttttgttttgatagagcagttctgaaacacactttttgtaaaatctgcaagaggatatttggatagctttgaggatttcgttggaaacgggaatgtcttcatgtaaactctagacagaagcattctcagaaactgctttgggatgtttcaattgaagtcccagtgttgaacattccctttcatagagcaggtttgaaacactctttttgtactatctggaagtggacatttggagcgctttcaggtctacggtgaaaaaggagatatcttccaataaaaactagatagaagcaatgtcagaacttttttcatgatgtatctactcagcaaacagagttgaacctttcttttgagagagcagttttgaaacactctttttgtggaatatgcaagtgggtattaggccagcttggaggatttcgttggaaacgggaatacgtataaaaagcagacagcagcattgtcagaaactactttgtgatgtttgcattcaagtcacagaattgaacactccctttcacagagcaggtttgaaacactctttttgtagtgtctgtaagtgaacatttggattgctttcaggcctaaggtgaaaaaggaaatatcttcccataaaaactagacagaagcattctcagaaacttgtttgtgatgtgtgccctctactgacagagttgaacctttctttgcaaagagcagttttgaaacactctttttgtagaatctgcaagaggatatttggatagctttgaggatttcttgggaaacgggaatgtcttcagataaactctagacagataagcattctcaaaaacttctttgggatgattcaattgaagtcacagtgttgaacattccctttcacagagcaggtttgaaaaactctttttgtagtgtctataagtgaacatttggcgtgctttcaggagtaacgtgaaaaaggaaatatcttcccataaaaactagacagaagcattctcagaaacttgtttgtgatgtgtgccctctactgacagagttgaacctttctttgcaaagagcagctttgaaacactctttttgtagaatctgcaagaggatatttggatagctttgaggatttcgttggaaacgggtatgtcttcagataaactctagacagaagcattctcagaaacttctttgagatgttgcattcaagtcacagagtagaacattcccattcatagagcagatttgaaacactctttttgtagtatctgaaagtggacatttggagcgctttcaggcctatgatgaaaaaggaaatatcttcccataaaaactagacggaagcattctcagaaacttatttgtgatgtgtttgctcaactaacaggattgaaccatcgttttgaaggagcagttttgaaacactgttttcgtggaatctgcaagtggatatttggctagctttgaggatttcgttggaaatgggattacatatacaaaggagacagcagcattctcagaaacttctttgtgatgtctgcattcaagtcacagagttgaacattccctttcatagagcaggtttgaaacactctttttgtagtatctggatgcggacatttggatcgctttcaggcctatggtgaaaaaggaaatatcttcccatgaaaactagacagaagcattctcagaaacttatttgtgatgtgtgccctcaactgacagtgttgaacctttgttttgatagagcagttctgaaacacactttttgtaaaatctgcaagaggatatttggatagctttgaggatttcgttggaaacgggaatgtcttcatgtaaactctagacagaagcattctcagaaactgctttgggatgtttctattgaagtcccagtgttgaacattccctttcatagagcaggtttgaaacactctttttgtagtatctggaagtggacatttggagcgctttcaggtctacggtgaaaaaggagatatcttccaataaaaactagatagaagcaatgtcagaacttttttcatgatgtatctactcagcaaacagagttgaacctttcttttgagagagcagttttgaaacactctttttgtggaatatgcaagtgggtattaggccagcttggaggatttcgttggaaacgggaatacgtataaaaagcagacagcagcattgtcagaaactactttgtgatgtttgcattcaagtcacagaattgaacactccctttcacagagcaggtttgaaacactctttttgtagtgtctgtaagtgaacatttggattgctttcaggcctaaggtgaaaaaggaaatatcttcccataaaaactagacagaagcattctcagaaacttgtttgtgatgtgtgccctctactgacagagttgaacctttctttgcaaagaccagttttgaaacactctttttgtagaatctgcaagaggatatttggatagctttgaggatttacttgggaaacgggaatgtcttcagataaactctagacagaagcattctcagaaacttctttgggatgtttcaattgaagtcacagtgttgaacattccctttcacagagcaggtttgaaacactctttttgtagtgtctataagtgaacatttggcgtgctttcaggcctaacgtgaaaaaggaaatatcttcccataaaaactagacagaagcattctcagaaacttgttcttgatgtgtcccctctactgacagaattgaacctttctttgcaaagagcagctttgaaacactctttttgtagaatctgcaagaggatatttggatagcttggaggatttcgttggaaacgggtatgtcttcagataaactctagacagaagcattctcagaaacttctttgggatgttgcattcaagtcacagagtagaacattcccattcatagagcagatttgaaacactctttttgtagtatctggaagtggacatttggagcgctttcaggcctatgttgaaaaaggaaatatcttcccataaaaactagacggaagcattctcagaaacttgttcttgatgtgtttgctcaactaacaggattgaaccatcgttttgaaggagcagttttgaaacactgttttcgtggaatctgcaagtggatatttggctagctttgaggatttcgttggaaacgggattacatataaaaaggagacagcagcattctcagaaacttctttgtgatgtctgcattcaattcacagagttgagcattccctttcatagagcaggttggaaacactctttttgtagtatctggatgtggacatttggatcgctttcaggcctatggtgaaaaaggaaatatcttcccatgaaaactagacagaagcattctcagaaacttatttgtgatgtgtgccctcaactgacagtgttgaacctttgttttgatagagcagttctgaaacacactttttgtaaaatctgcaagaggatatttggatagctttgaggatttcgttggaaacgggaatgtcttcatgtaaactctagacagaagcattctcagaaactgctttgggatgtttcaattgaagtcccagcgttgaacattcccattcatagagcaggtttgaaacactctttttgtactatctggaagtggacatttggagcgctttcaggtctacggtgaaaaaggagatatcttccaataaaaactagatagaagcaatgtcagaacttttttcatgatgtatctactcagcaaacagagttgaacctttcttttgagagagcagttttgacacagtctttgtggaatatgcaagtgggtattaggccagcttggaggatttcgttggaaacgggaatacgtataaaaagcagacagcagcattgtcagaaactactttgtgatgtttgcattcaagtcacagaattgaacactccctttcacagagcaggtttgaaacactctttttgtagtgtctgtaagtgaacatttggattgctttcaggcctatggtgaaaaaggaaatatcttcccataaaaactagacagaagcattctcagaaacttgtttgtgatgtgtgccctctactgacagagttgaacctttctttgcaaagagcagttttgaaacactctttttgtagaatctgcaagaggatatttggatagctttgaggatttcgttggaaacggaaatgtcttcatgtaaactctagacagaagcattctcagaaacttctttgggatgtttcaattgaagtcaccgtgttgaacattccctttcacagagcaggtttgaaacactctttttgtagtgtctataagtgaacatttggcgtgctttcaggcctaacgtgaaaaaggaaatatcttcccataaaaactagacagaagcattctcagaaacttgttcgtgatgtgtgccctctactgacagagttgaacctttctttgcaaagagcagctttgaaacacactttttgtagaatctgcaagaggatatttggatagctttgaggatttcgttggaaacgggtatgtcttcagataaactctagacagaagcattctcagaaacttctttgggatgttgcattcaagtcacagagtagaacattcccattcatagagcagatttgaaacactctttttgtagtatctggaagtggacatttggagcgctttcaggcctatgttgaaaaaggaaatatcttcccataaaaactagacggaagcattctcagaaacttatttgtgatgtgtttgctcaactaacaggattgaaccatcgttttgaaggagcagttttgaaacactgttttcgtggaatctgcaagtggatatttggctagctttgaggatttcgttggaaacgggattacatataaaaaggagacagcagcattctcagaaacttctttgtgatgtctgcattcaattcacagagttgagcattccctttcatagagcaggttggaaacactctttttgtagtatctggatgaggacatttggagcgctttcaggcgtatggtgaaaaaggaaatatcttcccgtaaaaactagacagaagcattctcagaagtttatttctgatgtgtgccctcaactaacagagttgaacctttcttttgatagagcagttttgaaacactctttttgtaaaatctgcaagaggatatttggatagctttgaggatttcgttgcaaacgggaatggcttcatataaactctagacagaagcattctcagaaacttcgttgggatgtttcgattgaagtcccagtgttgaacattcccttttatagagcaggttggaaacactctttctgcattccctggaagtggacatttggagcgctttcaggacgacggtgaaaatggaaatatcttccaagaaaatctagatagaagcaacgtcagaaacttttctgtgatggatctactcagctaacagagttgaacctttcttttgagagagcagttttgcaacactctttttgtggaatatgcaagtggatattagggcagctttgaggatttcgttggaaacgggaatacatgtaaaaagcagacagcagcattctcagaaacttctttgtgatgtttgcattgaagtcacagagttgaacattccctttgagagagcaggtttgaaacacgccttttgtcatatctggaagtgtccattcggagcgcattcaggcttgtgttgaaaaaggaaatatcctcccataaaaactagacagaagcattctcagaaacttatctgtgatgtatgtactcaactaacagaactaaaccatcgttttgaaggagcagttttgaaacactctttttgcggaatctgcaagtggatatttggctagctgggaggatttcgttggaaacgggattacatacaaaaagcagacagcagcattctcagaaacttctttgtgatgtttgcattcaagtcacagagttgaacattccctttcatagagcaggtttgaaacactctttttgtagtatctggatgtggacatttggatcgctttcaggcctatggtgaaaaaggaaatatcttcccatgaaaactagacagaagcattctcagaaacttatttgtgatgtgtgccctcaactgacagtgttgaacatttgttttgatagagcagttctgaaacacactttttgtaaaatctgcaagaggatatttggatagctttgaggatttcgttggaaacgggaatgtcttcatgtaaactctacacagaagcattctcagaaactgctttgggatgtttcaattgaagtcccagtgttgaacattcccattcatagagcaggtttgaaacactctttttgtactatctggaagtggacatttggagcgctttcaggtctacggtgaaaaaggagatatcttccaataaaaactagatagaagcaatgtcagaacttttttcatgatgtatctactcagctaacagagttgaacctttcttttgagagagcagttttgaaacactctttttgtggaatatgcaagtgggtattaggccagcttggaggatttcgttggaaacgggaatacgtataaaaagcagacagcagcattgtcagaaactactttgtgatgtttgcattcaagtcacagaattgaacactccctttcacagagcagatttgaaacactctttttgtagtgtctgtaagtgaacatatggattgctttcaggcctaaggtgaaaaaggaaatatcttcccataaaaactagacagaagcattctcagaaacttgtttgtgatgtgtgccctctactgacagagttgaacctttctttgcaaagagcagttttgaaacactctttttgtagaatctgcaagaggatatttggatagctttgaagatttcttgggaaacgggaatgtcttcagataaactctagacagaagcattctcagaaacttctttgggatgtttcaattgaagtcacagtgttgaacattccctttcacagagcaggtttgaaacactctttttgtagtgtctataagtgaacatttggcgtgcttcaggcctaacgtgaaaaaggaaatatcttcccataaaaactagacagataagcattctcagaaacttgttcgtgatgtgtgccctctactgacagagttgaacctttctttgcaaagagcagctttgaaacacactttttgtagaatctgcaagaggatatttggatagctttgaggatttcgttggaaacgggtatgtcttcagataaactctagacagaagcattctcagaaacttctttgggatgttgcattcaagtcacagagtagaacattcccattcatagagcagatttgaaacactctttttgtagtatctggaagtggacatttggagcgctttcaggcctatgttgaaaaaggaaatatcttcccataaaaactagacggaagcattctcagaaacttacttgtgatgtgtttgctcaactaacagaattgaaccatcgttttgaaggagcagttttgaaacactgttttcgtggaatctgcaagtggatatttggctagctttgaggatttcgttggaaacgggattacatataaaaaggagacagcagcattctcagaaacttctttgtgatgtctgcattcaagtcacagagttgagcattccctttcatagagcaggttggaaacactctttttgtagtatctggatgaggacatttggagcgctttcaggcgtatggtgaaaaaggaaatatcttcccgtaaaaactaggcagaagcattctcagaaatttatttgtgatgtgtgccctcaactaacagagttgaacctttcttttgatagagcagttttgaaacactctttttgtaaaatctgcaagaggatatttggatagctttgaggatttcgctgcaaacgggagtggcttcatataaactctagacagagcattctcagtaaacttcgttgggatgtttcgattgaagtcccaatgttgaacattccattttatagcgcaggttggaaacactctttttgcattccctggaagtggacatttggagcgctttcaggacgacggtgaaaatggaaatatcttctaataaaatctagatagaagcaatgtgagaaacttttatgtgatggatctactcagctaacagagttgaacctttcttttgagagagcagttttgcaacactctttttgtggaatatgcaagtggatattagggcagctttgaggatttcgttggaaacgggaatacatgtaaaaagcagacagcagcattctcagaaacttctttgtgatgtttgcattgaagtcacagagttgaacattccctttgagagagcaggtttgaaacacgccttttgtcatatctggaagtgtccattcggagcgcattcaggtttgtgttgaaaaaggaaatatcctcccataaaaactagacagaagcattcacagaaacttatttgtgatgtatgtactcaactaacagaactaaaccatcgttttgaaggagcagttttgaaacaccctttttgcggaatctgcaactggatatttggctagcttggaggatttcgttggaaacgggattacatacaaaaagcagacagcagcattctcagaaacttctttgtgatgtttgcattcaagtcgcagaggtgaacattccctttcatagagcaggtttgaaacactctttttgtagtatccggatgtggacatttggatcgctttcaggcctatggtgaaaaaggaaatatcttcccatgaaaactagacagaagcattctcagaaacttatttgtgatgtgtgccctcaactgacagtgttgaacctttgttttgatagagcagttctgaaacacactttttgtaaaatctgcaagaggatatttggatagctttgaggatttcgttggaaacgggaatgtcttcatgtaaactctagacagaagcattctcagaaactgctttgggatgtttctattgaagtcccagtgttgaacattccctttcatagagcaggtttgaaacactctttttgtagtatctggaagtggacatttggagcgctttcaggtctacggtgaaaaaggagatatcttccaataaaaactagatagaagcaatgtcagaacttttttcatgatgtatctactcagcaaacagagttgaacctttcttttgagagagcagttttgaaacactctttttgtggaatatgcaagtgggtattaggccagcttggaggatttcgttggaaacgggaatacgtataaaaagcagacagcagaattgtcagaaactactttgtgatgtttgcattcaagtcacagaattgaacactccctttcacagagcaggtttgaaacactctttttgtagtgtctgtaagtgaatatttggattgctttcagtcctaaggtgaaaaaggaaatatcttcccataaaaactagacagaagcattctcagaaacttgtttgtgatgtgtgccctctactgacagagttgaacctttctttgcaaagagcagttttgaaacaccctttttgtagaatctgcaagaggatatttggatagctttgaggatttcttgggaaacgggaatgtcttcagataaactctagacagaagcattctcagaaacttctttgggatgtttcaattgaagtcacagtgttgaacattccctttcacagagcaggtttcaaacactctttttgtagtgtctataagtgaacatttggcgtgctttcaggcctaacgtgaaaaaggaaatatcttcccataaaaactagacagaagtattctcagaaacttgttcgtgatgtgtgccctctactgacagagttgaacctttctttgcaaagagcagctttgaaacacactttttgtagaatctgcaagaggatatttggatagctttgaggatttcgttggaaacgggtatgtcttcagataaactctagacagaagcattctcagaaacttctttgggatgttgcattcaagtcacagagtagaacattcccattcatagagcagatttgaaacactctttttgtagtatctggaagtggacatttggagcgctttcaggcctatgatgaaaaaggaaatatcttcccataaaaactagacggaagcattctcagaaacttatttgtgatgtgtttgctcaactaacaggattgaaccatcgttttgaaggagcagttttgaaacactgttttcgtggaatctgcaagtggatatttggctagctttgaggatttcgttggaaacgggattacatataaaaaggagacagcagcattctcagaaacttctttgtgatgtctgcattcaattcacagagttgagcattccctttcatagagcaggttggaaacactctttttgtagtatctggatgaggacatttggagcgctttcaggcgtatggtgaaaaaggaaatatcttcccgtaaaaactagacagaagcattctcagaagtttatttgtgatgtgtgccctcaactaacagagttgaacctttcttttgatagagcagttttgaaacactctttttgtaaaatctgcaagaggatatttggatagctttgaggatttcgttgcaaacgggaatggcttcatataaactctagacagaagcattctcagaaacttcgttgggatgtttcgattgaagtcccagtgttgaacattcccttttatagagcaggttggaaacactctttctgcattccctggaagtggacatttggagcgctttcaggacgacggtgaaaatggaaatatcttccaagaaaatctagatagaagcaatgtcagaaacttctatgtgatggatctactcagctaacagagttgaagatttcttttgagagagcagttttgcaacactctttttgtggaatatgcaagtggatattagggcagctttgaggatttcgttggaaacgggaatacatgtaaaaagcagacagcagcattctcagaaacttctttgtgatgtttgcattgaagtcacagagttgaacattccctttgagagagcaggtttgaaacacgccttttgtcatatctggaagtgtccattcggagcgcattcaggcttgtgttgaaaaaggaaatatcctcccataaaaactagacagaagcattctcagaaacttatctgtgatgtatgtactcaactaacagaactaaaccatcgttttgaaggagcagttttgaaacactctttttgcggaatctgcaagtggatatttggctagctgggaggatttcgttggaaacgggattacatacaaaaagcagacagcagcattctcagaaacttctttgtgatgtttgcattcaagtcacagagttgaacattccctttcatagagcaggtttgaaacactctttttgtagtatctggatgtggacatttggatcgctttcaggcctatggtgaaaaaggaaatatcttcccatgaaaactagacagaagcattctcagaaacttatttgtgatgtgtgccctcaactgacagtgttgaacctttgttttgatagagcagttctgaaacacactttttgtaaaatctgcaagaggatatttggatagctttgaggatttcgttggaaacggaaatgtcttcatgtaaactctacacagaagcattctcagaaactgctttgggatgtttcaattgaagtcccagtgttgaacattccctttcatagagcaggtttgaaacactctttttgtactatctggaagtggacatttggagcgctttcaggtctacggtgaaaaaggagatatcttccaataaaaactagatagaagcaatgtcagaacttttttcatgatgtatctactcagcaaacagagttgaacctttcttttgagagagcagtttcgaaacactctttctgtggaatatgcaagtgggtattaggccagcttggaggatttcgttggaaacgggaatacgtataaaaagcagacagcagcattgtcagaaactactttgtgatgtttgcattcaagtcacagaattgaacactccctttcacagagcaggtttgaaacactctttttgtagtgtctgtaggtgaacatttggattgctttcaggcctaaggtgaaaaaggaaatatcttcccataaaaactagacagaagcattctcagaaacttgtttgtgatgtgtgccctctactgacagagttgaacctttctttgcaaagagcagttttgaaacactctttttgtagaatctgcaagaggatatttggatagctttgaggatttcttgggaaacgggaatgtcttcagataaactctagacagaagcattctcagaaacttctttgggatgtttcaattgaagtcacagtgttgaacattccctttcacagagcaggtttgaaacactctttttgtagtgtctataagtgaacatttggcgtgctttcaggcctaacgtgaaaaaggaaatatcttcccataaaaactagacagaagcattctcagaaacttgttcgtgatgtgtgccctctactgacagagttgaacctttctttgcaaagagcagctttgaaacactctttttgtagaatctgcaagaggatatttggatagcttggaggatttcgttggaaacgggtatgtcttcagataaactctagacagaagcattctcagaaacttctttgggatgttgcattcaagtcacagagtagaacattcccattcatagagcagatttgaaacactctttttgtagtatctggaagtggacatttggagcgctttcaggcctatgttgaaaaaggatatatcttcccataaaaactagacggaagcattctctgaaacttatttgtgatgtgtttgctcaactaacaggattgaaccatcgttttgaaggagcagttttgaaacactgttttcgtggaatctgcaagtggatatttggctagctttgaggatttcgttggaaacgggattacatatacaaaggagacagcagcattctcagaaacttctttgtgatgtctgcattcaattcacagagttgagcattccctttcatagagcaggttggaaacactctttttgtagtatctggatgaggacatttggagcgctttcaggcgtatggtgagaaaggaaatatcttgcccgtaaaaactagacagaagcattctcagaagtttatttgtgatgtgtgccctcaactaacagagttgaacctttcttttgatagagcagttttgaaacactctttttgtaaaatctgcaagaggatatttggataggtttgaggatttcgttgcaaacgggaatggcttcatataaactctagacagaagcattctcagaaacttcgttgggatgtttcgattgaagtcccagtgttgaacattcccttttatagagcaggttggaaacactctttctgcattccctggaagtggacatttggagcgctttcaggacgacggtgaaaatggaaatatcttccaagaaaatctagatagaagcaacgtcagaaacttttatgtgatggatctactcagctaacagagttgaacctttcttttgagagagcagttttgcaacactctttttgtggaatatgcaagtggatattagggcagctttgaggatttcgttggaaacgggaatacatgtaaaaagcagacagcagcattctcagaaacttctttgtgatgtttgcattgaagtcacagagttgaacattccctttgagagagcaggtttgaaacacgccttttgtcatatctggaagtgtccattcggagcgcattcaggcttgtgttgaaaaaggaaatatcctcccataaaaactagacagaagcattctcagaaacttatctgtgatgtatgtactcaactaacagaactaaaccatcgttttgaaggagcagttttgaaacactctttttgcggaatctgcaagtggatatttggctagctgggaggatttcgttggaaacgggattacatacaaaaagcagacagcagcattctcagaaacttctttgtgatgtttgcattcaagtcacagagttgaacattccctttcatagagcaggtttgaaacactctttttgtagtatctggatgtggacatttggatcgctttcaggcctatggtgaaaaaggaaatatcttcccatgaaaactagacagaagcattctcagaaacttatttgtgatgtgtgccctcaactgacagtgttgaacctttgttttgatagagcagttctgaaacacactttttgtaaaatctgcaagaggatatttggatagctttgaggatttcgttggaaacgggaatgtcttcatgtaaactctagacagaagcattctcagaaactgctttgggatgtttcaattgaagtcccagtgttgaacattcccattcatagagcaggtttgaaacactctttttgtactatctggaagtggacatttggagcgctttcaggtctacggtgaaaaaggagatatcttccaataaaaactagatagaagcaatgtcagaacttttttcatgatgtatctactcagcaaacagagttgaacctttcttttgagggagcagttttgaaacactatttttgtggaatatgcaagtgggtattaggccagcttggaggatttcgttggaaacgggaatacgtataaaaagcagacagcagcattgtcagaaactactttgtgatgtttgcattcaagtcacagaattgaacactccctttcacagagcaggtttgaaacactctttttgtagtgtctgtaagtgaacatttggattgctttcaggcctaaggtgaaaaaggaaatatcttcccataaaaactagacagaagcattctcagaaacttgtttgtgatgtgtgccctctactgacagagttgaacctttctttgcaaagaccagttttgaaacactctttttgtagaatctgcaagaggatatttggatagctttgaggatttcttgggaaacgggaatgtcttcagataaactctagacagaagcattctcagaaacttctttgggatgtttcaattgaagtcacagtgttgaacattccctttcacagagcaggtttgaaacactctttttgtagtgtctataagtgaacatttggcgtgctttcaggcctaacgtgaaaaaggaaatatcttcccataaaaactagacagaagcattctcagaaacttgttcgtgatgtgtgccctctactgacagagttgaacctttctttgcaaagagcagctttgaaacactctttttgtagaatctgcaagaggatatttggatagctttgaggatttcgttggaaacgggtatgtcttcagataaactctagacagaagcattctcagaaacttctttgggatgttgcattcaagtcacagagtagaacattcccattcatagagcagatttgaaacactctttttgtagtatctggaagtggacatttggagcgctttcaggcctatgttgaaaaaggaaatatcttcccataaaaactagacggaagcattctcagaaacttatttgtgatgtgtttgctcaactaacaggattgaaccatcgttttgaaggagcagttttgaaacactgttttcgtggaatctgcatgtggatatttggctagctttgaggatttcgttggaaacgggattacatataaaaaggagacagccagcattctcagtaaacttctttgtgatgtctgcattcaattcacagcagttgagcattccctttcatagagcaggttggaaacactctttttgtagtatctggatgaggacatttggagcgctttcaggcgtatggtgaaaaaggaaatatcttcccgtaaaaactagacagaagcattctcagaaatttatttgtgatgtgtgccctcaactaacagagttgaacctttcttttgatagagcagttttgaaacactctttttgtaaaatctgcaagaggatatttggatagctttgaggatttcgttgcaaacgggaatggcttcatataaactctagacagaagcattctcagaaacttcgttgggatgtttcgattgaagtcccagtgttgaacattcccttttatagagcaggttggaaacactctttctgcattccctggaagtggacatttggagcgctttcaggacgacggtgaaaatggaaatatcttccaagaaaatctagatagaagcaaccgtcagaaacttttctgtgatggatctactcagctaacagagttgaacctttcttttgagagagcagttttgcaacactctttttgtggaatatgcaagtggatattagggcagctttgaggatttcgttggaaacgggaatacatgtaaaaagcagacagcagcattctcagaaacttctttgtgatgtttgcattgaagtcacagagttgaacattccctttgagagagcaggtttgaaacacgccttttgtcatatctggaagtgtccattcggagcgcattcaggcttgtgttgaaaaaggaaatatcctcccagaaaaactagacagaagcattctcagaaacttatctgtgatgtatgtactcaactaacagaactaaaccatcgttttgaaggagcagttttgaaacactctttttgcggaatctgcaagtggatatttggctagctgggaggatttcgttggaaacgggattacatacaaaaagcagacagcagcattctcagaaacttctttgtgatgtttgcattcaagtcacagagttgaacattccctttcatagagcaggtttgaaacactctttttgtagtatctggatgtggacatttggatcgctttcaggcctatggtgaaaaaggaaatatcttcccatgaaaactagacagaagcattctcagaaacttatttgtgatgtgtgccctcaactgacagtgttgaacctttgttttgatagagcagttctgaaacacactttttgtaaaatctgcaagaggatatttggatagctttgaggatttcgttggaaacgggaatgtcttcatgtaaactctacacagaagcattctcagaaactgctttgggatgtttcaattgaagtcccagtgttgaacattcccattcatagagcaggtttgaaacactctttttgtactatctggaagtggacatttggagcgctttcaggtctacggtgaaaaaggagatatcttccaataaaaactagatagaagcaatgtcagaacttttttcatgatgtatctactcagcaaacagagttgaacctttcttttgagagagcagttttgaaacactctttttgtggaatatgaaagtgggtattaggccagcttggaggatttcgttggaaacgggaatacgtataaaaagcagacagcagcattgtcagaaactactttgtgatgtttgcattcaagtcacagaattgaacactccctttcacagagcaggtttgaaacactctttttgtagtgtctgtaagtgaacatttggattgctttcaggcctaaggtgaaaaaggaaatatcttcccataaaaactagacagaagcattctcagaaacttgtttgtgatgtgtgccctctactgacagagttgaacctttctttgcaaagagcagttttgaaacactctttttgtagaatctgcaagaggatatttggatagctttgaggatttcttgggaaacgggaatgtcttcagataaactctagacagaagcattctcagaaacttctttgggatgtttcaattgaagtcacagtgttgaacattccctttcacagagcaggtttgaaacactctttttgtagtgtctataagtgaacatttggcgtgctttcaggcgtaacgtgaaaaaggaaatatcttcccataaaaactagacagaagcattctcagaaacttgttcttgatgtgtgccctctactgacagagttgaacctttctttgcaaaaagcagctttgaaacactctttttgtagaatctgcaagaggatatttggatagcttggaggatttcgttggaaacgggtatgtcttcagataaactctagacagaagcattctcagaaacttctttgggatgttgcattcaagtcacagagtagaacattcccattcatagagcagatttgaaacactctttttgtagtatctggaagtggacatttggagcgctttcaggcctatgttgaaaaaggaaatatcttcccataaaaactagacggaagcattctcagaaacttatttgtgatgtgtttgctcaactaacaggattgaaccatcgttttgaaggagcagttttgaaacactgttttcgtggaatctgcaagtggttatttggctagctttgaggatttcgttggcaaacgggattacatatacaaaggagacagcagcattctcagaaacttctttgtgatgtctgcattcaattcacagagttgagcattccctttcttagagcaggttggaaacactctttttgtagtatctggatgaggacatttggagcgctttcaggcgtatggtgaaaaaggaaatatcttcccgtaaaaactagacagaagcattctcagaagtttatttgtgatgtgtgccctcaactaacagagttgaacctttcttttgatagagcagttttgaaacactctttttgtaaaatctgcaagaggatatttggatagctttgaggatttcgttgcaaacgggaatggcttcatataaactctagacagaagcattctcagaaacttcgttgggatgtttcgattgaagtcccagtgttgaacattcccttttatagagcaggttggaaacactctttctgcattccctggaagtggacatttggagcgctttcaggacgacggtgaaaatggaaatatcttccaagaaaatctagatagaagcaacgtcagaaacttttatgtgatggatctactcagcaaacagagttgaacctttcttttgagagagcagttttgcaacactctttttgtggaatatgcaagtggatattagggcagctttgaggatttcgttggaaacgggaatacatgtaaaaagcagacagcagcattctcagaaacttctttgtgatgtttgcattgaagtcacagagttgaacattccctttgagagagcaggtttgaaacacgccttttgtcatatctggaagtgtccattcggagcgcattcaggcttgtgttgaaaaaggaaatatcctcccataaaaactagacagaagcattctcagaaacttatctgtgatgtatgtactcaactaacagaactaaaccatcgttttgaaggagcagttttgaaacactctttttgcggaatctgcaagtggatatttggctagctgggaggatttcgttggaaacgggattacatacaaaaagcagacagcagcattctcagaaacttctttgtgatgtttgcattcaagtcacagagttgaacattccctttcatagagcaggtttgaaacactctttttgtagtatctggatgtggacatttggatcgctttcaggcctatggtgaaaaaggaaatatcttcccatgaaaactagacagaagcattctcagaaacttatttgtgatgtgtgccctcaactgacagtgttgaacctttgttttgatagagcagttctgaaacacactttttgtaaaatctgcaagaggatatttggatagctttgaggatttcgttggaaacgggaatgtcttcatgtaaactctagacagaagcattctcagaaactgctttgggatgtttcaattgaagtcccagtgttgaacattccctttcatagagcaggtttgaaacactctttttgtactatctggaagtggacatttggagcgctttcaggtctacggtgaaaaaggagatatcttccaataaaaactagatagaagcaatgtcagaacttttttcatgatgtatctactcagcaaacagagttgaacctttcttttgagagagcagttttgaaacactctttttgtggaatatgcaagtgggtattaggccagcttggaggatttcgttggaaacgggaatacgtataaaaagcagacagcagcattgtcagaaactactttgtgatgtttgcattcaagtcacagaattgaacactccctttcacagagcaggtttgaaacactctttttgtagtgtctgtaagtgaacatttggattgctttcaggcctaaggtgaaaaaggaaatatcttcccataaaaactagacagaagcattctcagaaacttgtttgtgatgtgtgccctctactgacagagttgaacctttctttgcaaagagcagttttgaaacactctttttgtagaatctgcaagaggatatttggatagctttgaggatttcttgggaaacgggaatgtcttcagataaactctagacagaagcattctcagaaacttctttgggatgtttcaattgaagtcacagtgttgaacattccctttcacagagcaggtttgaaacactctttttgtagtgtctataagtgaacatttggcgtgctttcaggcctaacgtgaaaaaggaaatatcttcccataaaaactagacagaagcattctcagaaacttgttcgtgatgtgtgccctctactgacagagttgaacctttctttgcaaagagcagctttgaaacacactttttgtagaatctgcaagaggatatttggatagcttggaggatttcgttggaaacgggtatgtcttcagataaactctagacagaagcattctcagaaacttctttgggatgttgcattcaagtcacagagtagaacattcccattcatagagcagatttgaaacactctttttgtagtatctggaagtggacatttggagcgctttcaggcctatgttgaaaaaggaaatatcttcccataaaaactagacggaagcattctcagaaacttaattgtgatgtgtttgctcaactaacaggattgaaccatcgttttgaaggagcagttttgaaacactgttttcgtggaatctgcaagtggatatttggctagctttgaggatttcgttggaaacgggattacatatacaaaggagacagcagcattctcagaaacttctttgtgatgtctgcattcaattcacagagttgagcattccctttcatagagcaggttggaaacactctttttgtagtatctggatgaggacatttggagcgctttcaggcctatggtgaaaaaggaaatatcttcccgtaaaaactagacagaagcattctcagtagtttatttgtgatgtgtgccctcaactaacagagttgaacctttcttttgatagagcagttttgaaacactctttttgtaaaatctgcaagaggatatttggatagctttgaggatttcgttgcaaacgggaatggcttcatataaactctagacagaagcattctcagaaacttcgttgggatgtttcgattgaagtcccagtgttgaacattcccttttatagagcaggttggaaacactctttctgcattccctggaagtggacatttggagcgctttcaggacgacggtgaaaatggaaatatcttccaagaaaatctagatagaagcaacgtcagaaacttttctgtgatggatctactcagctaacagagttgaacctttcttttgagagagcagttttgcaacactctttttgtggaatatgcaagtggatattagggcagctttgaggatttcgttggaaacgggaatacatgtaaaaagcagacagcagcattctcagaaacttctttgtgatgtttgcattgaagtcacagagttgaacattccctttgagagagcaggtttgaaacacgccttttgtcatatctggaagtgtccattcggagcgcattcaggcttgtgttgaaaaaggaaatatcctcccagaaaaactatacagaagcattctcagaaacttatctgtgatgtatgtactcaactagcagaactaaaccatcgttttgaaggagcagttttgaaacactctttttgcggaatctgcaagtggatatttggctagctgggaggatttcgttggaaacgggattacatacaaaaagcagacagcagcattctcagaaacttctttgtgatgtttgcattcaagtcacagagttgaacattccctttcatagagcaggtttgaaacactctttttgtagtatctggatgtggacatttggatcgctttcaggcctatggtgaaaaaggaaatatcttcccatgaaaactagacagaagcattctcagaaacttatttgtgatgtgtgccctcaactgacagtgttgaacctttgttttgatagagcagttctgaaacacactttttgtaaaatctgcaagaggatatttggatagctttgaggatttcgttggaaacgggaatgtcttcatgtaaactctagacagaagcattctcagaaactgctttgggatgtttcaattgaagtcccagtgttgaacattcccattcatagagcaggtttgaaacactctttttgtactatctggaagtggacatttggagcgctttcaggtctacggtgaaaaaggagatatcttccaataaaaactagatagaagcaatgtcagaacttttttcatgatgtatctactcagcaaacagagttgaacctttcttttgagggagcagttttgaaacactatttttgtggaatatgcaagtgggtattaggccagcttggaggatttcgttggaaacgggaatacgtataaaaagcagacagcagcattgtcagaaactactttgtgatgtttgcattcaagtcacagaattgaacactccctttcacagagcaggtttgaaacactctttttgtagtgtctgtaagtgaacatttggattgctttcaggcctaaggtgaaaaaggaaatatcttcccataaaaactagacagaagcattctcagaaacttgttcttgatgtgtgccctctactgacagagttgaacctttctttgcaaagagcagttttgaaacactctttttgtagaatctgcaagaggatatttggatagctttgaggatttcttgggaaacgggaatgtcttcagataaactctagacagaagcattctcagaaacttctttgggatgtttcaattgaagtcacagtgttgaacattccctttcacagagcaggtttgaaacactctttttgtagtgtctataagtgaacatttggcgtgctttcaggcgtaacgtgaaaaaggaaatatcttcccataaaaaccagacagaagcattctcagaaacttgttcttgatgtgtcccctctactgacagagttgaacctttctttgcaaagagcagctttgaaacactctttttgtagaatctgcaagaggatatttggatagcttggaggatttcgttggaaacgggtatgtcttcagataaactctagacagaagcattctcagaaacttctttgggatgttgcattcaagtcacagagtagaacattcccattcatagagcagatttgaaacactctttttgtagtatctggaagtggacatttggagcgctttcaggcctatgttgaaaaaggaaatatcttcccataaaaactagacggaagcattctcagaaacttatttgtgatgtgtttgctcaactaacaggattgaaccatcgttttgaaggagcagttttgaaacactgttttcgtggaatctgcaagtggatatttggctagctttgaggatttcgttggaaacgggattacatatacaaaggagacagcagcattctcagaaacttctttgtgatgtctgcattcaattcacagagttgagcattccctttcatagagcaggttggaaacactctttttgtagtatctggatgaggacatttggagcgctttcaggcgtatggtgaaaaaggaaatatcttcccgtaaaaactagacagaagcattctcagaaatttatttgtgatgtgtgccctcaactaacagagttgaacctttcttttgatagagcagttttgaaacactctttttgtaatatctgcaagaggatatttggatagctttgaggatttcattgcaaacgggaatggcttcatataaactctagacagaagcattctcagaaacttcgttgggatgtttcgattgaagtcccagtgttgaacattcccttttatagagcaggttggaaacactctttctccattccctggaagtggacatttggagcgctttcaggacgacggtgaaaatggaaatatcttccaataaaatctagatagaagcaacgtcagaaacttttatgtgatggatctactcagctaacagagttgaacctttcttttgagagagcagttttgcaacactctttttgtggaatatgcaagtggatattagggcagctttgaggatttcgttggaaacgggaatacatgtaaaaagcagacagcagcattctcagaaacttctttgtgatgtttgcattgaagtcacagagttgaacattccctttgagagagcaggtttgaaacacgccttttgtcatatctggaagtgtccattcggagcgcattcaggcttgtgttgaaaaaggaaatatcctcccataaaaactagacagaagcattctcagaaacttatctgtgatgtatgtactcaactaacagaactaaaccatcgttttgaaggagcagttttgaaacactctttttgcggaatctgcaagtggatatttggctagctgggaggatttcgttggaaacgggattacatacaaaaagcagacagcagcattctcagaaacttctttgtgatgtttgcattcaagtcacagagttgaacattccctttcatagagcaggtttgaaacactctttttgtagtatctggatgtggacatttggatcgctttcaggcctatggtgaaaaaggaaatatcttcccatgaaaactagacagaagcattctcagaaacttatttgtgatgtgtgccctcaactgacagtgttgaacctttgttttgatagagcagttctgaaacacactttttgtaaaatctgcaagaggatatttggatagctttgaggatttcgttggaaacgggaatgtcttcatgtaaactctacacagaagcattctcagaaactgctttgggatgtttcaattgaagtcccagtgttgaacattccctttcatagagcaggtttgaaacactctttttgtactatctggaagtggacatttggagcgctttcaggtctacggtgaaaaaggagatatcttccaataaaaactagatagaagcaatgtcagaacttttttcatgatgtatctactcagcaaacagagttgaacctttcttttgagagagcagttttgaaacactctttttgtggaatatgcaagtgggtattaggccagcttggaggatttcgttggaaacgggaatacgtataaaaagcagacagcagcattgtcagaaactactttgtgatgtttgcattcaagtcacagaattgaacactccctttcacagagcaggtttgaaacactctttttgtagtgtctgtaagtgaacatatggattgctttcaggcctaaggtgaaaaaggaaatatcttcccataaaaactagacagaagcattctcagaaacttgtttgtgatgtgtgccctctactgacagagttgaacctttctttgcaaagagcagttttgaaacactctttttgtagaatctgcaagaggatatttggatagctttgaggatttcttgggaaacgggaatgtcttcagataaactctagacagaagcattctcagaaacttctttgggatgtttcaattgaagtcacagtgttgaacattccctttcacagagcaggtttgaaacactctttttgtagtgtctataagtgaacatttggcgtgctttcaggcctaacgtgaaaaaggaaatatcttcccataaaaactagacagaagcattctcagaaacttgttcgtgatgtgtgccctctactgacagagttgaacctttctttgcaaagagcagctttgaaacactctttttgtagaatctgccagaggatatttggatagctttgaggatttcgttggaaacgggtatgtcttcagataaactctagacagaagcattctcagaaacttctttgggatgttgcattcaagtcacagagtagaacattcccattcatagagcagatttgaaacactctttttgtagtatctggaagtggacatttggagcgctttcaggcctatgttgaaaaaggaaatatcttcccataaaaactagacggaagcattctcagaaacttacttgtgatgtgtttgctcaactaacagaattgaaccatcgttttgaaggagcagttttgaaacactgttttcgtggaatctgcaagtggatatttggctagctttgaggatttcgttggaaacgggattacatataaaaaggagacagcagcattctcagaaacttctttgtgatgtctgcattcaagtcacagagttgagcattccctttcatagagcaggttggaaacactctttttgtagtatctggatgaggacatttggagcgctttcaggcgtatggtgaaaaaggaaatatcttcccgtaaaaactagacagaagcattctcagaaatttatttgtgatgtgtgccctcaactaacagagttgaacctttcttttgatagagcagttttgaaacactctttttgtaaaatctgcaagaggatatttggatagctttgaggatttcgttgcaaacgggaatggcttcatataaactctagacagaagcattctcagaaacttcgttgggatgtttcgattgaagtcccagtgttgaacattcccttttatagagcaggttggaaacactctttctgcattccctggaagtggacatttggagcgctttcaggacgacggtgaaaatggaaatatcttccaagaaaatctagatagaagcaacgtcagaaacttttctgtgatggatctactcagctaacagagttgaacctttcttttgagagagcagttttgcaacactctttttgtggaatatgcaagtggatattaaggcagctttgaggatttcgttggaaacgggaatacatgtaaaaagcagacagcagcattctcagaaacttctttgtgatgtttgcattgaagtcacagagttgaacattccctttgagagagcaggtttgaaacacgcctttcgtcatatctggaagtgtccattcggagcgcattcaggcttgtgttgaaaaaggaaatatcctcccagaaaaactagacagaagcattctcagaaacttatctgtgatgtatgtactcaactaacagaactaaagcatcgttttgaaggagcagttttgaaacactctttttgcggaatctgcaagtggatatttggctagctgggaggatttcgttggaaacgggattacatacaaaaagcagacagcagcattctcagaaacttatttgtgatgtgtgccctcaactgacagtgttgaacctttgttttgatagagcagttctgaaacacactttttgtaaaatctgcaagaggatatttggatagctttgaggatttcgttggaaacgggaatgtcttcatgtaaactctagacagaagcattctcagaaactgctttgggatgtttcaattgaagtcccagtgttgaacattccctttcatagagcaggtttgaaaccctctttttgtactatctggaagtggacatttggagcgctttcaggtctacggtgaaaaaggagatatcttccaataaaaactagatagaagcaatgtcagaacttttttcatgatgtatctactcagcaaacagagttgaacctttcttttgagagagcagttttgaaacactccttttgtggaatatgcaagtgggtattaggccagcttggaggatttcgttggaaacgggtaatacgtataaaaagcagacagcagcattgtcagaaactactttgtgatgtttgcattcaagtcacagaactgaacactccctttcacagagcaggtttgaaacactctttttgtagtgtctgtaagtgaacatttggattgctttcaggcctaaggtgaaaaaggaaatatcttcccataaaaactagacagaagcattctcagaaacttgtttgtgatgtgtgccctctactgacagagttgaacctttctttgcaaagagcagttttgaaacactctttttgtagaatctgcaagaggatatttggatagctttgaggatttcttgggaaacgggaatgtcttcagaaaaactctagacagaagcattctcagaaacttctttgggatgtttcaattgaagtcacagtgttgaacattccctttcacagagcaggtttgaaacactctttttgtagtgtctataattgaacatttggcgtgctttcaggcctaacgtgaaaaaggaaatatcttcccataaaaactagacagaagcattctcagaaacttgttcgtgatgtgtgccctctactgacagagttgaacctttctttgcaaagagcagctttgaaacactctttttgtagaatctgcaagaggatatgtggatagatttgaggatttcgttggaaacgggtatgtcttcagataaactctagacagaagcattctcagaaacttcttcgggatgtttcaattgaagtcattgttgaacattccctttcacagagcaggtttgaaacactctttttgtagtgtctatgagtgaacatttggcgtgctttcaggcgtaacgtgaaaaaggaaatatcttcccataaaaactagacagaagcattctcagaaacttgttcttgatgtgtcccctctactgacagagttgaacctttctttgcaaagagcagctttgaaacactctttttgtagaatctgcaagaggatatttggatagcttggaggatttcgttggaaacgggtatgtcttcagataaactctagacagaagcattctcagaaacttctttgggatgttgcattcaagtcacagagtagaacattcccattcatagagcagatttgaaacactctttttgtagtatctggaagtggacatttggagcgctttcaggcctatgttgaaaaaggaaatatcttcccatcaaaactagacggaaagcattctcagaaacttatttgtgatgtgtttgctcaactaacaggattgaaccatcgttttgaaggagcagttttgaaacactgttttcgtggaatctgcaagtggatatttggctagctttgaggatttcgttggaaacgggattacatataaaaaggagacagagcattctcagaaacttctttgtgatgtctgcattcaattcacagagttgagcattccctttcatagagcaggttggaaactctctttttgtagtatctggatgtggacatttggatcgctttcaggcctatggtgaaaaaggaaatatcttcccatgaaaactagacagaagcattctcagaaatttatttgtgatgtgtgccctcaactaacagagttgaacctttcttttgatagagcagttttgaaacactctttttgtaaaatctgcaagaggatatttggatagctttgaggatttcgttgcaaacgggaatggcttcatataaactctagacagaagcattctcagaaacttcgttgggatgtttcgattgaagtcccagtgttgaacattcccttttatagagcaggttggaaacactctttctgcattccctggaagtggacatttggagcgctttcaggacgacggtgaaaatggaaatatcttccaagaaaatctagatagaagcaatgtcagaaacttttatgtgatggatctactcagctaacagagttgaacctttcttttgagagagcagttttgcaacactctttttgtggaatatgcaagtggatattagggcagctttgaggatttcgttggaaacgggaatacatgtaaaaagcagacagcagcattctcagaaacttctttgtgatgtttgcattgaagtcacagagttgaacattccctttgagagagcaggtttgaaacacgccttttgtcatatctggaagtgtccattcggagcgcattcaggcttgtgttgaaaaaggaaatatcctcccataaaaagtatacagaaagcattctcagaaacttatctgtgatgtatgtactcaactaacagaactaaaccatcgttttgaaggagcagttttgaaacactctttttgcggaatctgcaagtggatatttggctagctgggaggatttcgttggaaacgggattacatacaaaaagcagacagcagcattctcagaaacttctttgtgatgtttgcattcaagtcacagagttgaacattccctttcataaagcaggtttgaaacactctttttgtagtatctggatgtggacatttggatcgctttcaggcctatggtgaaaaaggaaatatcttcccatgaaaactagacagaagcattctcagaaacttatttgtgatgtgtgccctcaactgacagtgttgaacctttgttttgatagagcagttctgaaacacactttttgtaaaatctgcaagaggatatttggatagctttgaggatttcgttggaaacgggaatgtcttcatgtaaactctagacagaagcattctcagaaactgctttgggatgtttcaattgaagtcccagtgttgaacattcccattcatagagcaggtttgaaacactctttttgtactatctggaagtggacatttggagcgctttcaggtctacggtgaaaaaggagatatcttccaataaaaactagatagaagcaatgtcagaactttttccatgatgtatctactcagcaaacagagttgaacctttcttttgagagagcagttttgaaacactctttttgtggaatatgcaactgggtattaggtcagcttggaggatttcgttggaaacgggaatacgtataaaaagcagacagcagcattgtcagaaactactttgtgatgtttgcattcaagtcacagaattgaacactccctttcacagagcaggtttgaaacactctttttgtagtgtctgtaagtgaacatttggattgctttcaggcctaaggtgaaaaaggaaatatcttcccataaaaactagacagaagcattctcagaaacttgtttgtgatgtgtgccctctactgacagagctgaacctttctttgcaaagagcagttttgaaacactctttttgtagaatctgcaagaggatatttggatagctttgaggatttcttgggaaacgggaatgtcttcagataaactctagacagaagcattctcagtaaacttctttgggatgtttcaattgaagtcacagtgttgaacattccctttcacagagcaggtttgaaacactctttttgtagtgtctataagtgaacatttggcgtgctttcaggcgtaacgtgaaaaaggaaatatcttcccataaaaactagacagaagcattctcagaaacttgttcttgatgtgtcccctctactgacagagttgaacctttctttgcaaagagcagctttgaaacactctttttgtagaatctgcaagaggatatttggatagcttggaggatttcgttggaaacgggtatgtcttcagataaactctagacagaagcattctcagaaacttctttgggatgttgcattcaagtcacagagtagaacattcccattcatagagcagatttgaaacactctttttgtagtatctggaagtggacatttggagcgctttcaggcctatgttgaaaaaggaaatatcttcccataaaaactacacggaagcattctcagaaacttatttgtgatgtgtttgctcaactaacaggattgaaccatcgttttgaaggagcagttttgaaacactgttttcgtggaatctgcaagtggatatttggctagctttgaggatttcgttggaaacgggattacatataaaaaggagacagcagcattctcagaaacttctttgtgatgtttgcattcaattcacagagttgagcattccctttgatagagcaggttggaaacactctttttgtagtatctggatgtggacatttggatcgctttcaggcctatggtgaaaaaggaaatatcttcccatgaaaactagacagaagcattctcagaaatttatttgtgatgtgtgccctcaactaacagagttgaacctttcttttgatagagcagttttgaaacactctttttgtaaaatctgcaagaggatatttggatagctttgaggatttcattgcaaacgggaatggcttcatataaactctagacagaagcattctcagaaacttcgttgggatgtttcgattgaagtcccagtgttgaacattcccttttatagagcaggttggaaacactctttctgcattccctggaagtggacatttggagcgctttcaggacgacggtgaaaatggaaatatcttccaataaaatctagatagaagcaacgtcagaaacttttatgtgatggatctactcagctaacagagttgaacctttcttttgagagagcagttttgcaacactctttttgtggaatatgcaagtggatattagggcagctttgaggatttcgttggaaacgggaatacatgtaaaaagcagacagcagcattctcagaaacttctttgtgatgtttgcattgaagtcacagagttgaacattccctttgagagagcaggtttgaaacacgccttttgtcatatctggaagtgtccattcggagcgcattcaggcttgtgttgaaaaaggaaatatcctcccataaaaactagacagaagcattctcagaaacttatttgtgatgtatgtactcaagtaacagaactaaaccatcgttttgaaggagcagttttgaaacactctttttgcggaatctgcaagtggatatttggctagctgggaggatttcgttggaaacgggattacatacaaaaagcagacagcagcattctcagaaacttctttgtgatgtttgcattcaagtcacagagttgaacattccctttcatagagcaggtttgaaacactctttttgtagtatctggatgtggacatttggatcgctttcaggcctatggtgaaaaaggaaatatcttcccatgaaaactagacagaagcattctcagaaacttatttgtgatgtgtgccctcaactgacagtgttgaacctttgttttgatagagcagttctgaaacacactttttgtaaaatctgcaagaggatatttggatagctttgaggatttcgttggaaacgggaatgtcttcatgtaaactctagacagaagcattctcagaaactgctttgggatgtttcaattgaagtcccagtgttgaacattcccattcatagagcaggtttgaaacactctttttgtactatctggaagtggacatttggagcgctttcaggtctacggtgaaaaaggagatatcttccaataaaaactagatagaagcaatgtcagaacttttttcatgatgtatctactcagcaaacggagttgaacctttcttttgagggagcagttttgaaacactatttttgtggaatatgcaagtgggtattaggccagcttggaggatttcgttggaaacggtaatacgtataaaaagcagacagcagcattgtcagaaactactttgtgatgtttgcattcaagtcacagaattgaacactccctttcacagagcaggtttgaaacactctttttgtagtgtctgtaagtgaacatttggattgctttcaggcctaaggtgaaaaaggaaatatcttcccataaaaactagacagaagcattctcagaaacttgtttgtgatgtgtgccctctactgacagagttgaacctttctttgcaaagagcagttttcaaacactctttttgtagaatctgcaagaggatatttggatagctttgaggatttcttgggaaacgggaatgtcttcagataaactctagacagaagcattctcagaaacttctttgggatgtttcaattgaagtcacagtgttgaacattccctttcacagagcaggtttgaaacactctttttgtagtgtctataagtgaacatttggcgtgctttcaggcctaacgtgaaaaaggaaatatcttcccataaaaactagacagaagcattctcagaaacttgttcttgatgtgtcccttctactgacagagttgaacctttctttgcaaagagcagctttgaaacactctttttgtagaatctgcaagaggatatttggatagcttggaggatttcgttggaaacgggtatgtcttcagataaactctagacagaagcattctcagaaacttctttgggatgttgcattcaagtcacagagtagaacattcccattcatagagcagatttgaaacactctttttgtagtatctggaagtggacatttggagcgctttcaggcctatgttgaaaaaggaaatatcttcccataaaaactagacggaagcattctcagaaacttacttgtgatgtgtttgctcaactaacagaattgaaccatcgttttgaaggagcagttttgaaacactgttttcgtggaatctgcaagtggatatttggctagctttgaggatttcgttggaaacgggattacatataaaaaggagacagcagcattctcagaaacttctttgtgatgtctgcattcaagtcacagagttgagcattccctttcatagagcaggttggaaacactctttttgtagtatctggatgaggacatttggagcgctttcaggcgtatggtgaaaaaggaaatatcttcccgtaaaaactagacagaagcattctcagaaatttatttgtgatgtgtgccctcaactaacagagttgaacctttcttttgatagagcagttttgaaacactctttttgtaaaatctgcaagaggatatttggatagctttgaggatttcgttgcaaacgggaatggcttcatataaactctagacagaagcattctcagaaacttcgttgggatgtttcgattgaagtcccagtgttgaacattcccttttatagagcaggttggaaacactctttctgcattccctggaagtggacatttggagcgctttcaggacgacggtgaaaatggaaatatcttccaataaaatctagatagaagcaatgtcagaaacttttatgtgatggatctactcagctaacagagttgaacctttcttttgagagagcagttttgcaacactctttttgtggaatatgcaagtggatattagggcagctttgaggatttcgttggaaacgggaatacatgtaaaaagcagacagcagcattctcagaaacttctttgtgatgtttgcattgaagtcacagagttgaacattccctttgagagagcaggtttgaaacacgccttttgtcatatctggaagtgtccattcggagcgcattcaggcttgtgttgaaaaaggaaatatcctcccataaaaactagacagaagcattctcagaaacttatctgtgatgtatgtactcaactaacagaactaaaccatcgttttgaaggagcagttttgaaacactctttttgcggaatctgcaagtggatatttggctagctgggaggatttcgttggaaacgggattacatacaaaaagcagacagcagcattctcagaaacttctttgtgatgtttgcattcaagtcacagagttgaacattccctttcatagagcaggtttgaaacactctttttgtagtatctggatgtggacatttggatcgctttcaggcctatggtgaaaaaggaaatatcttcccatgaaaactagacagaagcattctcagaaacttatttgtgatgtgtgccctcaactgacagtgttgaacctttgttttgatagagcagttctgaaacacactttttgtaaaatctgcaagaggatatttggatagctttgaggatttcgttggaaacggggaatgtcttcatgtaaactctagacagaagcattctcagaaactgctttgggatgtttcaattgaagtcccagtgttgaacattccctttcatagagcaggtttgaaacactctttttgtactatctggaagtggacatttggagcgctttcaggtctacggtgaaaaaggagatatcttccaataaaaactagatagataaagaagcaatgtcagaacttttttcatgatgtatctactcagcaaacagagttgaacctttcttttgagggagcagttttgaaacactatttttgtggaatatgcaagtgggtattaggccagcttggaggatttcgttggaaacggtaatacgtataaaaagcagacagcagcattgtcagaaactactttgtgatgtttgcattcaagtcacagaattgaacactccctttcacagagcaggtttgaaacactctttttgtagtgtctgtaagtgaacatttggattgctttcaggcctaaggtgaaaaaggaaatatcttcccataaaaactagacagaagcattctcagaaacttgtttgtgatatgtgccctctactgacagagttgaacctttctttgcaaagagcagttttgaaacactctttttgtagaatctgcaagaggatatttggatagctttgaggatttcttgggaaacgggaatgtcttcagataaactctagacagaagcattctcagcaaacttctttgggatgtttcaattgaagtcacagtgttgaacattccctttcacagagcaggtttgaaacactctttttgtagtgtctataattgaacatttggcgtgctttcaggcctaacgtgaaaaaggaaatatcttcccataaaaactagacagaagcattctcagaaacttgttcgtgatgtgtgccctctactgacagacttgaacctttctttgcaaagagcagctttgaaacattctttttgtagaatctgccagaggatatttggatagctttgaggatttcgttggaaacgggtatgtcttcagataaactctagacagaagcattctcagaaacttctttgggatgttgcattcaagtcacagagtagaacattcccattcatagagcagatttgaaacactctttttgtagtatctggaagtggacatttggagcgctttcaggcctatgttgaaaaaggaaatatcttcccataaaaactagacggaagcattctcagaaacttacttgtgatgtgtttgctcaactaacagaattgaaccatcgttttaaaggagcagttttgaaacactgttttcgtggaatctgcaagtggatatttggctagctttgaggatttcgttggaaacgggattacatataaaaaggagacagcagcattctcagaaacttctttgtgatgtctgcattcaagtcacagagttgagcattccctttcatagagcaggttggaaacactctttttgtagtatctggatgaggacatttggagcgctttcaggcctatggtgaaaaaggaaatatcttcccgtaaaaactagacagaagcattctcagaaatttatttgtgatgtgtgccctcaactaacagagttgaacctttcttttgatagagcagttttgaaacactctttttgtaaaatctgcaagaggatatttggatagctttgaggatttcgttgcaaacgggaatggcttcatataaactctagacagaagcattctcagaaacttcgttgggatgtttcgattgaagtcccagtgttgaacattcccttttatagagcaggttggaaacactctttctgcattccctggaagtggacatttggagcgctttcaggacgacggtgaaaatggaaatatcttccaagaaaatctagatagaagcaatgtcagaaacttttatgtgatggatctactcagctaacagagttgaacctttcttttgagagagcagttttgcaacactctttttgtggaatatgcaagtggatattaggccagctttgaggatttcgttggaaacgggaatacatgtaaaaagcagacagcagcattctcagaaacttctttgtgatgtttgcattgaagtcacagagttgaacattccctttgagagagcaggtttgaaacacgccttttgtcatatctggaagtgtccattcggagcgcattcaggcttgtgttgaaaaaggaaatatcctcccataaaaactatacagaagcattctcagaaactgatttgtgatgtatgtactcaactaacagaactaaaccatcgttttgaaggagcagttttgaaacactctttttgcggaatctgcaagtggatatttggctagctgggaggatttcgttggaaacgggattacatacaaaaagcagacagcagcattctcagaaacttctttgtgatgtttgcattcaagtcacagagttgaacattccctttcatagagcaggtttgaaacactctttttgtagtatctggatgtggacatttggatcgctttcaggcctatggtgaaaaaggaaatatcttcccatgaaaactagacagaagcattctcagaaacttatttgtgatgtgtgccctcaactgacagtgttgaacctttgttttgatagagcagttctgaaacacactttttgtaaaatctgcaagaggatatttgcatagctttgaggatttcgttggaaacgggaatgtcttcatgtaaactctagacagaagcattctcagaaactgctttgggatgtttcaattgaagtcccagtgttgaacattccctttcatagagcaggtttgaaacactctttttgtactatctggaagtggacatttggagcgctttcaggtctacggtgaaaaaggagatatcttccaataaaaactagatagaagcaatgtcagaacttttttcatgatgtatctactcagcaaacagagttgaacctttcttttgagagagcagttttgaaacactctttttgtggaatatgcaagtgggtattaggccagcttggaggatttcgttggaaacgggaatacgtataaaaagcagacagcagcattgtcagaaactactttgtgatgtttgcattcaagtcacagaattgaacactccctttcacagagcaggtttgaaacactctttttgtagtgtctgtaagtgaacatttggattgctttcaggcctaaggtgaaaaaggaaatatcttcccataaaaactagacagaagcattctcagaaacttgtttgtgatgtgtgccctctactgacagagttgaacctttctttgcaaagagcagttttgaaacactctttttgtagaatctgcaagaggatatttggatagctttgaggatttcttgggaaacgggaatgtcttcatgtaaactctggacagaagcattctcagaaactgctttgggatgtttcaattgaagtcccagtgttgaacattccctttcatagagcaggtttgaaacactctttttgtactatctggaagtggacatttggagcgctttcaggtctacggtgaaaaaggagatatcttccaataaaaactagatagaagcaatgtcagaacttttttcatgatgtatctactcagcaaacagagttgaacctttcttttgagagagcagttttgaaacactctttttgtggaatatgcaagtgggtattaggccagcttggaggatttcgttggaaacgggaatacgtataaaaagcagacagcagcattgtcagaaactactttgtgatgtttgcattcaagtcacagaattgaacactccctttcacagagcaggtttgaaacactctttttgtagtgtctgtaagtgaacatttggattgctttcaggcctaaggtgaaaaaggaaatatcttcccataaaaactagacagaagcattctcagaaacttgtttgtgatgtgtgccctctactgacagagttgaacctttctttgcaaagaccagttttgaaacactctttttgtagaatctgcaagaggatatttggatagctttgaggatttcttgggaaacgggaatgtcttcagataaactctagacagaagcattctcagaaacttctttgggatgtttcaattgaagtcacagtgttgaacattccctttcacagagcaggtttgaaacactctttttgtagtgtctataagtgaacatttggcgtgctttcaggcctaacgtgaaaaaggaaatatcttcccataaaaactagacagaagcattctcagaaacttgttcttgatgtgtcccctctactgacagagttgaacctttctttgcaaagagcagctttgaaacactctttttgtagaatctgcaagaggatatttggatagcttggaggatttcgttggaaacgggtatgtcttcagataaactctagacagaagcattctcagaaacttctttgggatgttgcattcaagtcacagagtagaacattcccattcatagagcagatttgaaacactctttttgtagtatctggaagtggacatttggagcgctttcaggcctatgttgaaaaaggaaatatcttcccataaaaactagacggaagcattctcagaaacttatttgtgatatgtttgctcaactaacaggattgaaccatcgttttgaaggagcagttttgaaacactgttttcgtggaatctgcaagtggatatttggctagctttgaggatttcgttggaaacgggattacatataaaaaggagacagcagcattctcagaaacttctttgtgatgtctgcattcaattcacagagttgagcattccctttcatagagcaggttggaaacactctttttgtagtatctggatgaggacatttggagcgctttcaggcgtatggtgaaaaaggaaatatcttcccgtaaaaactagacagaagcattctcagaagtttatttgtgatgtgtgccctcaactaacagacttgaacctttcttttgatagagcagttttgaaacactcattttgtaaaatctgcaagaggatatttggatagctttgaggatttcgttgcaaacgggaatggcttcatataaactctagacagaagcattctcagaaacttcgtcgggatgtttcgattgaagtcccagtgttgaacattcccttttatagagcaggttagaaacactctttctgcattccctggaagtggacaattggagcgctttcaggacgacggtgaaaatggaaatatcttccaataaaatctggatagaagcaatgtcagaaacttttatgtgatggatctactcagctaacagagttgaacctttcttttgagagagcagttttgcaacactctttttgtggaatatgcaagtggatattagggcagctttgaggatttcgttggaaacgggaatacatgtaaaaagcagacagcagcattctcagaaacttctttgtgatgtttgcattgaagtcacagagttgaacattccctttgagagagcaggtttgaaacacgccttttgtcatatctggaagtgtccattcggagcgcattcaggcttgtgttgaaaaaggaaatatcctcccataaaaactagacagaagcattctcagaaacttatctgtgatgtatgtactcaactaacagaactaaaccatcgttttgaaggagcagttttgaaacactctttttgcggaatctgcaagtggatatttggctagctgggaggatttcgttggaaacgggattacatacaaaaagcagacagcagcattctcagaaacttctttgtgatgtttgcattcaagtcacagagttgaacattccctttcatagagcaggttggaaacactctttttgtagtatctggatgtggacatttggatcgctttcaggcctatggtgaaaaaggaaatatcttcccatgaaaactagacagaagcattctcagaaacttatttgtgatgtgtgccctcaactgacagtgttgaacctttgttttgatagagcagttctgaaacacactttttgtaaaatctgcaagaggatatttggatagctttgaggatttcgttggaaacgggaatgtcttcatgtaaactctggacagaagcattctcagaaactgctttgggatgtttcaattgaagtcccagtgttgaacattccctttcatagagcaggtttgaaacactctttttctactatctggaagtggacatttggagcgctttcaggtctacggtgaaaaaggagatatcttccaataaaaactagatagaagcaatgtcagaacttttttcatgatgtatctactcagcaaacagagttgaacctttcttttgagagagcagttttgaaacactctttttgtggaatatgcaagtgggtattaggccagcttggaggatttcgttggaaacgggaatacgtataaaaagcagacagcagcattgtcagaaactactttgtgatgtttgcattcaagtcacagaattgaacactccctttcacagagcaggtttgaaacactctttttgtagtgtctgtaagtgaacatttggattgctttcaggcctaaggtgaaaaaggaaatatcttcccataaaaactagacagaagcattctcagaaacttgtttgtgatgtgtgccctctactgacagagttgaacctttctttgcaaagagcagttttgaaacactctttttgtagaatctgcaagaggatatttggatagctttgaggatttcttgggaaacgggaatgtcttcagataaactctagacagaagcattctcagaaacttctttgggatgtttcaattgaagtcacagtgttgaacattccctttcacagagcaggtttgaaacactctttttgtagtgtctataagtgaacatttggcgtgctttcaggactaacgtgaaaaaggaaatatcttcccataaaaactagacagaagcattctcagaaacttgttcttgatgtgtcccctctactgacagagttgaacctttctttgcaaagagcagctttgaaacactctttttgtagaatctgcaagaggatatttggatagcttggaggatttcgttggaaacgggtatgtcttcagataaactctagacagaagcattctcagaaacttctttgggatgttgcattcaagtcacagagtagaacattcccattcatagagcagatttgaaacactctttttgtagtatctggaagtggacatttggagcgctttcaggcctatgttgaaaaaggaaatatcttcccataaaaactagacggaagcattctcagaaacttatttgtgatgtgtttgctcaactaacaggattgaaccatcgttttgaaggagcagttttgaaacactgttttcgtggaatctgcaagtggatatttggctagctttgaggatttcgttggaaacgggattacatataaaaaggagacagcagcattctcagaaacttctttgtgatgtctgcattcaattcacagagttgagcattccctttcatagagcaggttggaaacactctttttgtagtatctggatgaggacatttggagcgctttcaggcctatggtgaaaaaggaaatatcttcccgtaaaaactagacagaagcattctcagaagtttatttgtgatgtgtgccctcaactaacagagttgaacctttcttttgatagagcagttttgaaacactctttttgtaaaatctgcaagaggatatttggatagctttgaggatttcgttgcaaacgggaatggcttcatataaactctagacagaagcattctcagaaacttcgttgggatgtttcgattgaagtcccagtgttgaacattcccttttatagagcaggttggaaacactctttctgcattccctggaagtggacatttggagcgctttcaggacgacggtgaaaatggaaatatcttccaagaaaatctagatagaagcaatgtcagaaacttttatgtgatggatctactcagctaacagagttgaacctttcttttgagagagcagttttgtaacactctttttgtggaatatgcaagtggatattagggcagctttgaggatttcgttggaaacgggaatacatgtaaaaagcagacagcagcattctcagaaacttctttgtgatgtttgcattgaagtcacagagttgaacattccctttgagagagcaggtttgaaacacgccttttgtcatatctggaagtgtccattcggagcgcattcaggcttgtgttgaaaaaggaaatatcctcccataaaaactagacagaagcattctcagaaacttatctgtgatgtatgtactcaactaacagaactaaaccatcgttttgaaggagcagttttgaaacactctttttgcggaatctgcaagtggatatttggctagctgggaggatttcgttggaaacgggattacatacaaaaagcagacagcagcattctcagaaacttctttgtgatgtttgcattcaagtcacagagttgaacattccctttcatagagcaggtttgaaacactctttttgtagtatctggatgtggacatttggatcgctttcaggcctatggtgaaaaaggaaatatcttcccatgaaaactagacagaagcattctcagaaacttatttgtgatgtgtgccctcaactgacagtgttgaacctttgttttgatagagcagttctgaaacacactttttgtaaaatctgcaagaggatatttggatagctttgaggatttcgttggaaacgggaatgtcttcatgtaaactctagacagaagcattctcagaaactgctttgggatgtttcaactgaagtcccagtgttgaacattcccattcatagagcaggtttgaaacactctttttgtactatctggaagtggacatttggagcgctttcaggtctacggtgaaaaaggagatatcttccaataaaaactagatagaagcaatgtcagaacgtttttcatgatgtatctactcagcaaacagagttgaacctttcttttgagagagcagttttgacacagtctttgtggaatatgcaagtgggtattaggccagcttggaggatttcgttggaaacgggaatacgtataaaaagcagacagcagaattgtcagaaacttctttgggatgtttgcattcaagtcacagaattgaactctccctttcacagagcaggtttgaaacactctttttgtagtgtctgtaagtgaacatttggattgctttcaggcctaaggtgaaaaaggaaatatcttcccataaaaactagacagtagcattctcagaaacttgtttgtgatgtgtgccctctactgacagagttgaacctttctttgcaaagagcagttttgaaaccctctttttgtaaaatctgcaagaggatatttggattgatttgaggatttcttgggaaacgggaatgtcttcagataaactctagacagaagcattctcagaaacttctttgggatgtttcaattgaagtcacagtgttgaacattccctttcacagagcaggtttgaaacactctttttgtagtgtctataagtgaacatttggcgtgctttcaggcctaacgtgaaaaaggaaatatcttcccataaaaactagacagaagcattctcagaaacttgttcgtgatgtgtgccctctactgacagagttgaacctttctttgcaaagagcagctttgaaacactctttttgtagaatctgcaagaggatatttggatagctttgaggatttcgttggaaacgggtatgtcttcagataaactctagatagaagcattctcagaaacttctttgggatgttgcattcaagtcacagagtagaacattcccattcatagagcagatttgaaacactctttttgaagtatctggaagtggacatttggagcgctttcaggcctatgttgaaaaaggaaatatcttcccataaaaactagacggaagcattctcagaaacttacttgtgatgtgtttgctcaactaacagaattgaaccatcgttttgaaggagcagttttgaaacactgttttcgtggaatctgcaagtggatatttggctagctttgaggatttcgttggaaacgggattacatataaaaaggagacagcagcattctcagaaacttctttgtgatgtctgcattcaagtcacagagttgagcattccctttcatagagcaggttggaaacactctttttgtagtatctggatgaggacatttggagcgctttcaggcgtatggtgaaaaaggaaatatcttcccgtaaaaactagacagaagcattctcagaaatttatttgtgatgtgtgccctcaactaacagagttgaacctttcttttgatagagcagttttgaaacactctttttgtaaaatctgcaagaggatatttggatagctttgaggatttcgttgcaaacgggaatggcttcatatacactctagacagaagcattctcagaaacttcgttgggatgtttcgattgaagtcccagtgttgaacattcccttttatagagcaggttggaaacactctttctgcattccctggaagtggacatttggagcgctttcaggacgacggtgaaaatggaaatatcttccaagaaaatctagatagaagcaacgtcagaaacttttctgtgatggatctactcagctaacagagttgaacctttcttttgagagagcagttttgcaacactctttttgtggaatatgcaagtggatattagggcagctttgaggatttcgttggaaacgggaatacatgtaaaaagcagacagcagcattctcagaaacttctttgtgatgtttgcattgaagtcacagagttgaacattccctttgagagagcaggtttgaaacacgccttttgtcatatctggaagtgtccattcggagcgcattcaggcttgtgttgaaaaaggaaatatcctcccataaaaactagacagaagcattctcagaaacttatctgtgatgtatgtactcaactaacagaactaaaccatcgttttgaaggagcagttttgaaacactctttttgcggaatctgcaagtggatatttggctagctgggaggatttcgttggaaacgggattacatacaaaaagcagacagcagcattctcagaaacttctttgtgatgtttgcattcaagtcacagagttgaacattccctttcatagagcaggtttgaaacactctttttgtagtatctggatgtggacatttggatcgctttcaggcctatggtgaaaaaggaaatatcttcccatgaaaactagacagaagcattctcagaaacttatttgtgatgtgtgccctcaactgacagtgttgaacctttgttttgatagagcagttctgaaacacactttttgtaaaatctgcaagaggatatttggatagctttgaggatttcgttggaaacgggaatgtcttcatgtaaactctacacagaagcattctcagaaactgctttgggatgtttcaattgaagtcccagtgttgaacattcccattcatagagcaggtttgaaacactctttttgtactatctggaagtggacatttggagcgctttcaggtctacggtgaaaaaggagatatctttcaataaaaactagatagaagcaatgtcagaacttttttcatgatgtatctactcagcaaacagagttgaacctttcttttgagagagcagttttgaaacactctttttgtggaatatgcaagtgggtattaggccagcttggaggatttcgttggaaacgggaatacgtataaaaagcagacagcagcattgtcagcaactactttgtgatgtttgcattcaagtcacagaattgaacactccctttcacagagcaggtttgaaacactctttttgtagtgtctgtaagtgaacatttggattgctttcaggcctaaggtgaaaaaggaaatatcttcccataaaaactagacagaagcattctcagaaacttgtttgtgatgtgtgccctctactgacagagttgaacctttctttgcaaagagcagttttgaaacactctttttgtagaatctgcaagaggatatttggatagctttgaggatttcttgggaaacgggaatgtcttcagataaactctagacagaagcattctcagaaacttctttgggatgtttcaattgaagtcacagtgttgaacattccctttcacagagcaggtttgaaacactctttttgtagtgtctataagtgaacatttggcgtgctttcaggcctaacgtgaaaaaggaaatatcttcccataaaaactagacagaagcattctcagaaacttgttcttgatgtgtcccctctactgacagagttgaacctttctttgcaaagagcagctttgaaacacactttttgtagaatctgcaagaggatatttggatagcttggaggatttcgttggaaacgggtatgtcttcagataaactctagacagaagcattctcagaaacttctttgggatgttgcattcaagtcacagagtagaacattcccattcatagagcagatttgaaacactctttttgtagtatctggaagtggacatttggagcgctttcaggcctatgttgaaaaaggaaatatcttcccataaaaactagacggaagcattctcagaaacttatttgtgatgtgtttgctcaactaacaggattgaaccatcgttttgaaggagcagttttgaaacactgttttcgtggaatctgcaagtggatatttggctagctttgaggatttcgttggaaacgggattacatataaaaaggagacagcagcattctcagaaacttctttgtgatgtctgcattcaattcacagagttgagcattccctttcatagagcaggttggaaacactctttttgtagtatctggatgaggacatttggagcgctttcaggcgtatggtgaaaaaggaaatatcttcccgtaaaaactagacagaagcattctcagaagtttatttgtgatgtgtgccctcaactaacagagttgaacctttcttttgatagagcagttttgaaacactctttttgtaaaatctgcaagaggatatttggatagctttgaggatttcgttgcaaacgggaatggcttcatataaactctagacagaagcattctcagaaacttcgttgggatgtttcgattgaagtcccagtgttgaacattcccttttatagagcaggttggaaacactctttctgcattccctggaagtggacatttggagcgctttcaggacgacggtgaaaatggaaatatcttccaagaaaatctagatagaagcaatgtcagaaacttttatgtgatggatctactcagctaacagagttgaacctttcttttgagagagcagttttgcaacactctttttgtggaatatgcaagtggatattagggcagctttgaggatttcgttggaaacgggaatacatgtaaaaaggagacagcagcattctcagaaacttctttgtgatgtttgcattgaagtcacagagttgaacattccctttgagagagcaggtttgaaacacgccttttgtcatatctggaagtgtccattcggagcgcattcaggcttgtgttgaaaaaggaaatatcctcccataaaaactagacagaagcattctcagaaacttatctgtgatgtatgtactcaactaacagaactaaaccatcgttttgaaggagcagttttgaaacactctttttgcggaatctgcaagtggatatttggctagctgggaggatttcgttggaaacgggattacatacaaaaagcagacagcagcattctcagaaacttctttgtgatgtttgcattcaagtcacagagttgaacattccctttcatagagcaggtttgaaacactctttttgtagtatctggatgtggacatttggatcgctttcaggcctatggtgaaaaaggaaatatcttcccatgaaaactagacagaagcattctcagaaacttatttgtgatgtgtgccctcaactgacagtgttgaacctttgttttgatagagcagttctgaaacacactttttgtaaaatctgcaagaggatatttggatagctttgaggatttcgttggaaacgggaatgtcttcatgtaaactctagacagaagcattctcagaaactgctttgggatgtttcaattgaagtcccagtgttgaacattcccattcatagagcaggtttgaaacactctttttgtactatctggaagtggacatttggagcgctttcaggtctacggtgaaaaaggagatatcttccaataaaaactagatagaagcaatgtcagaacttttttcatgatgtatctactcagcaaacagagttgaacctttcttttgagagagcagttttgaaacactctttttgtggaatatgcaagtgggtattaggccagcttggaggatttcgttggaaacgggaatacgtataaaaagcagacagcagcattgtcagaaactactttgtgatgtttgcattcaagtcacagaattgaacactccctttcacagagcaggtttgaaacactctttttgtagtgtctgtaagtgaacatttggattgctttcaggcctaaggtgaaaaaggaaatatcttcccataaaaactagacagaagcattctcagaaacttgtttgtgatgtgtgccctctactgacagagttgaacctttctttgcaaagagcagttttgaaacactctttttgtagaatctgcaagaggatatttggatagctttgaggatttcttgggaaacgggaatgtcttcagataaactctagacagaagcattctcagaaacttctttgggatgtttcaattgaagtcacagtgttgaacattccctttcacagagcaggtttgaaacactctttttgtagtatctggaagtggacatttggagcgctttcaggcctatgttgaaaaaggaaatatcttcccataaaaactagacggaagcattctcagaaacttatttgtgatgtgtttgctcaactaacaggattgaaccatcgttttgaaggagcagttttgaaacactgttttcgtggaatctgcaagtggatatttggctagctttgaggatttcgttggaaacgggattacatataaaaaggagacagcagcattctcagaaacttctttgtgatgtctgcattcaattcacagagttgagcattccctttcatagagcaggttggaaacactctttttgtagtatctggatgaggacatttggagcgctttcaggcctatggtgaaaaaggaaatatcttcccgtaaaaactagacagaagcattctcagtagtttatttgtgatgtgtgccctcaactaacagagttgaacctttcttttgatagagcagttttgaaacactctttttgtaaaatctgcaagaggatatttggatagctttgaggatttcgttgcaaacgggaatggcttcatataaactctagacagaagcattctcagaaacttcgttgggatgtttcgattgaagtcccagtgttgaacattcccttttatagagcaggttggaaacactctttctgcattccctggaagtggacatttggagcgctttcaggacgacggtgaaaatggaaatatcttccaagaaaatctagatagaagcaatgtcagaaacttttatgtgatggatctactcagctaacagagttgaacctttcttttgagagagcagttttgcaacactctttttgtggaatatgcaagtggatattagggcagctttgaggatttcgttggaaacgggaatacatgtaaaaagcagacagcagcattctcagaaacttctttgtgatgtttgcattgaagtcacagagttgaacattccctttgagagagcaggtttgaaacacgccttttgtcatatctggaagtgtccattcggagcgcattcaggcttgtgttgaaaaaggaaatatcctcccataaaaactagacagaagcattctcagaaacttatctgtgatgtatgtactcaactaacagaactaaaccatcgttttgaaggagcagttttgaaacactctttttgcggaatctgcaagtggatatttggctagctgggaggatttcgttggaaacgggattacatacaaaaagcagagagcagcattctcagaaacttctttgtgatgtttgcattcaagtcacagagttgaacattccctttcatagagcaggtttgaaacactctttttgtagtatctggatgtggacatttggatcgctttcaggcctatggtgaaaaaggaaatatcttcccatgaaaactagacagaagcattctcagaaacttatttgtgatgtgtgccctcaactgacagtgttgaacctttgttttgatagagcagttctgaaacacactttttgtaaaatctgcaagaggatatttggatagctttgaggatttcgttggaaacgggaatgtcttcatgtaaactctagacagaagcattctcagaaactgctttgggatgtttcaattgaagtcccagtgttgaacattccctttcatagagcaggtttgaaacactctttttgtactatctggaagtggacatttggagcgctttcaggtctacggtgaaaaaggagatatcttccaataaaaactagatagaagcaatgtcagaacttttttcatgatgtatctactcagcaaacagagttgaacctttcttttgagagagcagttttgaaacactctttttgtggaatatgcaagtgggtattaggccagcttggaggatttcgttggaaacgggaatacgtataaaaagcagacagcagcattgtcagaaactactttgtgatgtttgcattcaagtcacagaattgaacactccctttcacagagcaggtttgaaacactctttttgtagtgtctgtaagtgaacatttggattgctttcaggcctaaggtgaaaaaggaaatatcttcccataaaaactagacagaagcattctcagaaacttgtttgtgatgtgtgccctctactgacagagttgaacctttctttgcaaagagcagttttgaaacactctttttgtagaatctgcaagaggatatttggatagctttgaggatttcttgggaaacgggaatgtcttcagataaactctagacagaagcattctcagaaacttctttgggatgtttcaattgaagtcacagtgttgaacattccctttcacagagcaggtttgaaacactctttttgtagtgtctataagtgaacatttggcgtgctttcaggcctaacgtgaaaaaggaaatatcttcccataaaaactagacagaagcattctcagaaacttgttcgtgatgtgtgccctctactgacagagttgaacctttctttgcaaagagcagctttgaaacacactttttgtagaatctgcaagaggatatttggatagatttgaggatttcgttggaaacgggtatgtcttcagataaactctagacagaagcattctcagaaacttctttgggatgttgcattcaagtcacagagtagaacattcccattcatagagcagatttgaaacactctttttgtagtatctggaagtggacatttggagcgctttcaggcctatgttgaaaaaggaaatatcttcccataaaaactagacggaagcattctcagaaacttacttgtgatgtgttttctcaactaacagaattgaaccatcgttttgaaggagcagttttgaaacactgttttcgtggaatctgcaagtggatattttgctagctttgaggatttcgttggaaacgggattacatataaaaaggagacaggagcattctcagaaacttctttgtgatgtctgcattcaattcacagagttgagcattccctttcatagagcacgttggaaacactctttttgtagtatctggatgaggacatttggagcgctttcaggcctatggtgaaaaaggaaatatcttcccgtaaaaactagacagaagcattctcagaagtttatttgtgatgtgtgccctcaactaacagagttgaacctttcttttgatagagcagttttgaaacactctttttgtaaaatctgcaagaggatatttggatagctttgaggatttcgttgcaaacgggaatggcttcatataaactctagacagaagcattctcagaaacttcgttgggatgtttcgattgaagtcccagtgttgaacattcccttttatagagcaggttggaaacactctttctgcattccctggaagtggacatttggagcgctttcaggacgacggtgaaaatggaaatatcttccaagaaaatctagatagaagcaatgtcagaaacttttatgtgatggatctactcagctaacagagttgaagctttcttttgagagagcagttttgcaacactctttttgtggaatatgcaagtggatattagggcagctttgaggatttcgttggaaacgggaatacatgtaaaaagcagacagcagcattctcagaaacttctttgtgatgtttgcattgaagtcacagagttgaacattccctttgagagagcaggtttgaaacacgccttttgtcatatctggaagtgtccattcggagcgcattcaggcttgtgttgaaaaaggaaatatcctcccataaaaactagacagaagcattctcagaaacttatctgtgatgtatgtactcaactaacagaactaaaccatcgttttgaaggagcagttttgaaacactctttttgcggaatctgcaagtggatatttggctagctgggaggatttcgttggaaacgggattatatacaaaaagcagacagcagcattctcagaaacttctttgtgatgtttgcattcaagtcacagagttgaacattccctttcatagagcaggtttgaaacactctttttgtagtatctggatgtggacatttggatcgctttcaggcctatggtgaaaaaggaaatatcttcccatgaaaactagacagaagcattctcagaaacttatttgtgatgtgtgccctcaactgacagtgttgaacctttgttttgatagagcagttctgaaacacactttttgtaaaatctgcaagaggatatttggatagctttgaggatttcgttggaaacgggaatgtcttcatgtaaactctagacagaagcattctcagaaactgctttgggatgtttcaattgaagtcccagtgttgaacattccctttcatagagcaggtttgaaacactctttttgtactatctggaagtggacatttggagcgctttcaggtctacggtgaaaaaggagatatcttccaataaaaactagatagaagcaatgtcagaacttttttcatgatgtatctactcagcaaacagagttgaacctttcttttgagagagcagttttgaaacactctttttgtggaatatgcaagtgggtattaggccagcttggaggatttcgttggaaacgggaatacgtataaaaagcagacagcagcattgtcagaaactactttgtgatgtttgcattcaagtcacagaattgaacactccctttcacagagcaggtttgaaacactctttttgtagtgtctataagtgaacatttggcgtgctttcaggcctaaggtgaaaaaggaaatatcttcccataaaaactagacagaagcattctcagcaaacttgttcttgatgtgtcccctctactgagagagttgaacctttctttgcaaagagcagctttgaaacactctttttgtagaatctgcaagaggatatttggatagcttggaggatttcgttggaaacgggtatgtcttcagataaactctagacagaagcattctcagaaacttctttgggatgttgcattcaagtcacagagtagaacattcccattcatagagcagatttgaaacactctttttgtagtatctggaagtggacatttggagcgctttcaggcctatgttgaaaaaggaaatatcttcccataaaaactagacggaaagcattctcagaaacttatttgtgatgtgtttgctcaactaacaggattgaaccatcgttttgaaggagcagttttgaaacactgttttcgtggaatctgcaagtggatatttggctagctttgaggatttcgttggaaacgggattacatatacaaaggagacagcagcattctcagaaacttctttgtgatgtctgcattcaattcacagagttgagcattccctttcatagagcaggttggaaacactctttttgtagtatctggatgaggacatttggagcgctttcaggcgtatggtgaaaaaggaaatatcttcccgtaaaaactagacagaagcattctcagaagtttatttgtgatgtgtgccctcaactaacagagttgaacctttcttttgatagagcagttttgaaacactctttttgtaaaatctgcaagaggatatttggatatctttgaggatttcgttgcaaacgggaatggcttcatataaactctagacagaagcattctcagaaacttcgttgggatgtttcgattgaagtcccagtgttgaacattcccttttatagagcaggttggaaacactctttctgcattccctggaagtggacatttggagcgctttcaggacgacggtgaaaatggaaatatcttccaagaaaatctagatagaagcaacgtcagaaacttttatgtgatggatctactcagctaacagagttgaacctttcttttcagagagcagttttgcaacactctttttgtggaatatgcaagtggatattagggcagctttgaggatttcgttggaaacgggaatacatgtaaaaagcagacagcagcattctcagaaacttctttgtgatgtttgcattgaagtcacagagttgaacattccctttgagagagcaggtttgaaacacgccttttgtcatatctggaagtgtccattcggagcgcattcaggcttgtgttgaaaaaggaaatatcctcccataaaaactagacagaagcattctcagaaacttatctgtgatgtatgtactcaactaacagaactaaaccatcgttttgaaggagcagttttgaaacactctttttgcggaatctgcaagtggatatttggctagctgggaggatttcgttggaaacgggattacatacaaaaagcagacagcagcattctcagaaacttctttgtgatgtttgcattcaagtcacagagttgaacattccctttcatagagcaggtttgaaacactctttttgtagtatctggatgtggacatttggatcgctttcaggcctatggtgaaaaaggaaatatcttcccatgaaaactagacagaagcattctcagaaacttatttgtgatgtgtgccctcaactgacagtgttgaacctttgttttgatagagcagttctgaaacacactttttgtaaaatctgcaagaggatatttggatagctttgaggatttcgttggaaacgggaatgtcttcatgtaaactctacacagaagcattctcagaaactgctttgggatgtttcaattgaagtcccagtgttgaacattcccattcatagagcaggtttgaaacactctttttgtactatctggaagtggacatttggagcgctttcaggtctgcggtgaaaaaggagatatcttccaataaaaactagatagaagcaatgtcagaacttttttcatgatgtatctactcagcacacagagttgaacctttcttttgagagagcagttttgaaacactctttttgtggaatatgcaagtgggtattaggccagcttggaggatttcgttggaaacgggaatacgtataaaaagcagacagcagcattgtcagaaactactttgtgatgtttgcattcaagtcacagaattgaacactccctttcacagagcaggtttgaaacactctttttgtagtgtctgtaagtgaacatatggattgctttcaggcctaaggtgaaaaaggaaatatcttcccataaaaactagacagaagcattctcagaaacttgtttgtgatgtgtgccctctactgacagagttgaacctttctttgcaaagagcagttttgaaacactctttttgtagaatctgcaagaggatatttggatagctttgaagatttcttgggaaacgggaatgtcttcagataaactctagacagaagcattctcagaaacttctttgggatgtttcaattgaagtcacagtgttgaacattccctttcacagagcaggtttgaaacactctttttgtagtgtctataagtgaacatttggcgtgctttcaggcctaacgtgaaaaaggaaatatcttcccataaaaactagacagaagcattctcagaaacttgttcatgatgtgtgccctctactgacagagttgaacctttctttgcaaagagcagctttgaaacactctttttgtagaatctgcaagaggatatttggatagctttgaggatttcgttggaaacgggtatgtcttcagataaactctagacagaagcattctcagaaacttctttgggatgttgcattcaagtcacagagtagaacattcccattcatagagcagatttgaaacactctttttgtagtatctggaagtggacatttggagcgctttcaggcctatgttgaaaaaggaaatatcttcccataaaaactagacggaagcattctcagaaacttacttgtgatgtgtttgctcaactaacagaattgaaccatcgttttgaaggagcagttttgaaacactgttttcgtggaatctgcaagtggatatttggctagctttgaggatttcgttggaaacgggattacatataaaaaggagacagcaacattctcagaaacttctttgtgatgtctgcattcaagtcacagagttgagcattccctttcatagagcaggttggaaacactctttttgtagtatctggatgaggacatttggagcgctttcaggcgtatggtgaaaaaggaaatatcttcccgtaaaaactagacagaagcattctcagaaatttatttgtgatgtgtgccctcaactaaccgagttgaacctttcttttgatagagcagttttgaaacactctttttgtaaaatctgcaagaggatatttggatagctttgaggatttcgttgcaaacgggaatggcttcatataaactctagacagaagcattctcagaaacttcgttgggatgtttcgattgaagtcccagtgttgaacattcccttttatagagcaggttggaaacactctttctgcattccctggaagtggacatttggagcgctttcaggacgacggtgaaaatggaaatatcttccaagaaaatctagatagaagcaatgtcagaaacttttatgtgatggatctactcagctaacagagttgaacctttcttttgagagagcagttttgcaacactctttttgtggaatatgcaagtggatattagggcagctttgaggatttcgttggaaacgggaatacatgtaaaaagcagacagcagcattctcagaaacttctttgtgatgtttgcattgaagtcacagagttgaacattccctttgagagagcaggtttgaaacacgccttttgtcatatctggaagtgtccattcggagcgcattcaggcttgtgttgaaaaaggaaatatcctcccataaaaactagacagaagcattctcagaaacttatgctgtgatgtatgtactcaactaacagaactaaaccatcgttttgaaggagcagttttgaaacactctttttgcggaatctgcaagtggatatttggctagctgggaggatttcgttggaaacgggattacatacaaaaagcagacagcagcattctcagaaacttctttgtgatgtttgcattcaagtcacagagttgaacattccctttcatagagcaggtttgaaacactctttttgtagtatctggatgtggacatttggatgctttcaggcctatggtgaaaaaggaaatatcttcccatgaaaactagacagaagcattctcagaaacttatttgtgatgtgtgccctcaactgacagtgttgaacctttgttttgatagagcagttctgaaacacactttttgtaaaatctgcaagaggatatttggatagctttgaggatttcgttggaaacgggaatgtcttcatgtaaactctagacagaagcattctcagaaactgctttgggatgtttcaattgaagtcccagtgttgaacattcccattcatagagcaggtttgaaacactctttttgtactatctggaagtggacatttggagcgctttcaggtctacggtgaaaaaggagatatcttccaataaaaactagatagaagcaatgtcagaacttttttcatgatgtatctactcagcaaacagagttgaacctttcttttgagagagcagttttgaaacactctttttgtggaatatgcaagtgggtattaggccagcttggaggatttcgttggaaacgggaatacgtataaaaagcagacagcagcattgtcagaaactactttgtgatgtttgcattcaagtcacagaattgaacactccctttcacagagcaggtttgaaacactctttttgtagtgtctgtaagtgaacatttggattgctttcaggcctaaggtgaaaaaggaaatatcttcccataaaaactagacagaagcattctcagaaacttgtttgtgatgtgtgccctctactgacagagttgaacctttctttgcaaagagcagttttgaaacactctttttgtagaatctgcaagaggatatttggatagctttgaggatttcttgggaaacgggaatgtcttcagataaactctagacagaagcattctcagaaacttctttgggatgtttcaattgaagtcacagtgttgaacattccctttcacagagcaggtttgaaacactctttttgtagtgtctataagtgaacatttggcgtgctttcaggcctaacgtgaaaaaggaaatatcttcccataaaaactagacagaagcattctcagaaacttgttcgtgatgtgtgccctctactgacagagttgaacctttctttgcaaagagcagctttgaaacacactttttgtagaatctgcaagaggatatttggatagcttggaggatttcgttggaaacgggtatgtcttcagataaactctagacagaaacattctcagaaacttctttgggatgttgcattcaagtcacagagtagaacattcccatgcatagagcagatttgaaacactctttttgtagtatctggaagtggacatttggagcgctttcaggcctatgttgaaaaaggaaatatcttcccataaaaactagacgggaagcattctcagaaacttatttctgatgcgtttgctcaactaacagaattgaaccatcgttttgaaggagcagttttgaaactctgttttcgtggaatctgcaagtggatatttggctaactttgaggatttcgttggaaacgggattacctataaaaaggagacagcagcattctcagaaacttctttgtgatgtctgcattcaagtcacagagttgagcattccctttcatagagcaggtttgaaacattctttttgtagtatctggatgaggacatttggagcgatttcaggcgtatggtgaaaaaggaaatatcttcccgtaaaaactagacagaagcattctcagaaatttatttgtgatgtgtgccctcaactaacagagttgaacctttcttttgatagagcagttttgaaacactctttttgtaaaatctgcaagaggatatttggatagctttgaggatttcgttgcaaacgggaatggcttcatataaactctagacagaagcattctcagaaacttcgttgggatgtttcgattgaagtcccagtgttgaacattcccttttatagagcaggttggaaacactctttctgcattccctggaagtggacatttggagtgctttcaggacgacggtgaaaatggaaatatcttccaagaaaatctagatagaagcaacgtcagaaacttttctgtgatggatctactcagctaacagagttgaacctttcttttgagagagcagttttgcaacactctttttgtggaatatgcaagtggatattagggcagctttgaggatttcgttggaaacgggaatacatgtaaaaagcagacagcagcattctcagaaacttctttgtgatgtttgcattgaagtcacagagttgaacattccctttgagagagcaggtttgaaacacgccttttgtcatatctggaagtgtccattcggagcgcattcaggcttgtgttgaaaaaggaaatatcctcccagaaaaactagacagaagcattctcagaaacttatctgtgatgtatgtactcaactaacagaactaaaccatcgttttgaaggagcagttttgaaacactctttttgcggaatctgcaagtggatatttggctagctgggaggatttccgttggaaacgggattacatacaaaaagcagacagcagcattctcagaaacttatttgtgatgtgtgccctcaactgacagtgttgaacctttgttttgatagaacagttctgaaacacactttttgtaaaatctgcaagaggatatttggatagctttgaggatttcgttggaaacgggaatgtcttcatgtaaactctagacagaagcattctcagaaactgctttgggatgtttcaattgaagtcccagtgttgaacattccctttcataggagcaggtttgaaacactctttttgtactatctggaagtggacatttggagcgctttcaggtctacggtgaaaaaggagatatcttccaataaaaactagatagaagcaacgtcagaaacttttctgtgatggatctactcagctaacagagttgaacctttcttttgagagagcagttttgcaacactctttttgtggaatatgcaagtggatattagggcagctttgaggatttcgttggaaacgggaatacatgtaaaaagcagacagcagcattctcagaaacttctttgtgatgtttgcattgaagtcacagagttgaacattccctttgagagagcaggtttgaaacacgccttttgtcatatctggaagtgtccattcggagcgcattcaggcttgtgttgaaaaaggaaatatcctcccataaaaactagacagaagcattctcagaaacttatctgtgatgtatgtactcaactaacagaactaaaccatcgttttgaaggagcagttttgaaacactctttttgcggaatctgcaagtggatatttggctagctgggaggatttcgttggaaacgggattacatacaaaaagcagacagcagcattctcagaaacttctttgtgatgtttgcattcaagtcacagagttgaacattccctttcatagagcaggtttgaaacactctttttgtagtatctggatgtggacatttggatcgctttcaggcctatggtgaaaaaggaaatatcttcccatgaaaactagacagaagcattctcagaaacttatttgtgatgtgtgccctcaactgacagtgttgaacctttgttttgatagagcagttctgaaacacactttttgtaaaatctgcaagaggatatttggatagctttgaggatttcgttggaaacgggaatgtcttcatgtaaactctagacagaagcattctcagaaactgctttgggatgtttcaattgaagtcccagtgttgaacattccctttcatagagcaggtttgaaacactctttttgtactatctggaagtggacatttggagcgctttcaggtctacggtgaaaaaggagatatcttccaataaaaactagatagaagcaatgtcagaacttttttcatgatgtatctactcagcaaacagagttgaacctttcttttgagagagcagttttgaaacactctttttgtggaatatgcaagtgggtattaggccagcttggaggatttcgttggaaacgggaatacgtataaaaagcagacagcagcattgtcagaaactactttgtgatgtttgcattcaagtcacagaattgaacactccctttcacagagcaggtttgaaacactctttttgtagtgtctgtaagtgtacatttggattgctttcaggcctaaggtgaaaaaggaaatatcttcccataaaaactagacagaagcattctcagaaacttgtttgtgatgtgtgccctctactgacagagttgaacctttctttgcaaagggcagttttgaaacactctttttgtagaatctgcaagaggatatttggatagctttgaggatttcttgggaaacgggaatgtcttcagataaactctagacagaagcattctcagaaacttctttgggatgtttcaattgaagtcacagtgttgaacattccctttcacagagcaggtttgaaacactctttttgtagtgtctataagtgaacatttggcgtgctttcaggcctaacgtgaaaaaggaaatatcttcccataaaaactagacagaagcattctcagaaacttgttcgtgatgtgtgccctctactgacagagttgaacctttctttgcaaagagcagctttgaaacacactttttgtagaatctgcaagaggatatttggatagctttgaggatttcgttggaaacgggtatgtcttcagataaactctagacagaagcattctcagaaacttctttgggatgttgcattcaagtcacagagtagaacattcccattcatagagcagatttgaaacactctttttgtagtatctggaagtggacatttggagcgctttcaggcctatgttgaaaaaggaaatatcttctcataaaaactagacggaatcattctcagaaacttatttgtgatgtgtttgctcaactaacaggattgaaccatcgttttgaaggagcagttttgaaacactgttttcgtggaatctgcaagtggatatttggctagctttgaggatttcgttggaaacgggattacatataaaaaggagacagcagcattctcagaaacttctttgtgatgtctgcattcaattcacagagttgagcattccctttcatagagcaggttggaaacactctttttgtagtatctggatgaggacatttggagcgctttcaggcctatggtgaaaaaggaaatatcttcccgtaaaaactagacagaagcattctcagaaatttatttgtgatgtgtgccctcaactaacagagttgaacctttcttttgatagagcagttttgaaacactctttttgtaaaatctgcaagaggatatttggatagctttgaggatttcattgcaaacgggaatggcttcatataaactctagacagaagcattctcagaaacttcgttgggatgtttcgattgaagtcccagtgttgaacattcccttttatagagcaggttggaaacactctttctgcattccctggaagtggacatttggagcgctttcaggacgacggtgaaaatggaaatatcttccaagaaaatctagatagaagcaacgtcagaaacttttatgtgatggatctactcagctaacagagttgaacctttcttttgagagagcagttttgcaacactctttttgtggaatatgcaagtggatattagggcagctttgaggatttcgttggaaacgggaatacatgtaaaaagcagacagcagcattctcagaaacttctttgtgatgtttgtattgaagtcacagagttgaacattccctttgagagagcaggtttgaaacacgccttttgtcatatctggaagtgtccattcggagcgcattcaggcttgtgttgaaaaaggaaatatcctcccataaaaactagacagaagcattctcagaaacttatctgtgatgtatgtactcaactaacagaactaaaccatcgttttgaaggagcagttttgaaacactctttttgcggaatctgcaagtggatatttggctagctgggaggatttcgttggaaacgggattacatacaaaaagcagacagcagcattctcagaaacttctttgtgatgtttgcattcaagtcacagagttgaacattccctttcatagagcaggtttgaaacactctttttgtagtatctggatgtggacatttggatcgctttcaggcctatggtgaaaaaggaaatatcttcccatgaaaactagacagaagcattctcagaaacttatttgtgatgtgtgccctcaactgacagtgttgaacctttgttttgatagagcagttctgaaacacactttttgtaaaatctgcaagaggatatttggatagctttgaggatttcgttggaaacgggaatgtcttcatgtaaactctagacagaagcattctcagaaactgctttgggatgtttcaattgaagtcccagtgttgaacattcccattcatagagcaggtttgaaacactctttttgtactatctggaagtggacatttggagcgctttcaggtctacggtgaaaaaggagatatcttccaataaaaactagatagaagcaatgtcagaacttttttcatgatgtatctactcagcaaacagagttgaacctttcttttgagagagcagttttgaaacactctttttgtggaatatgcaagtgggtattaggccagcttggaggatttcgttggaaacgggaatacgtataaaaagcagacagcagcattgtcagtaaactactttgtgatgtttgcattcaagtcacagaattgaacactccctttcacagagcaggtttgaaacactctttttgtagtgtctgtaagtgaacatttggattgctttcaggcctaaggtgaaaaaggaaatatcttcccataaaaactagacagaagcattctcagaaacttgtttgtgatgtgtgccctctactgacagagctgaacctttctttgcaaagagcagttttgaaacactctttttgtagaatctgcaagaggatatttggatagctttgaggatttcttgggaaacgggaatgtcttcagataaactctagacagaagcattctgagaaacttctttgggatgtttcaattgaagtcacagtgttgaacattccctttcacagagcaggtttgaaacactctttttgtagtgtctataagtgaacatttggcgtgctttcaggcgtaacgtgaaaaaggaaatatcttcccataaaaactagacagaagcattctcagaaacttgttcttgatgtgtcccctctactgacagagttgaacctttctttgcaaagagcagctttgaaacactctttttgtagaatctgcaagaggatatttggatagcttggaggatttcgttggaaacgggtatgtcttcagataaactctagacagaagcattctcagaaacttctttgggatgttgcattcaagtcacagagtagaacattcccattcatagagcagatttgaaacactctttttgtagtatctggaagtggacatttggagcgctttcaggcctatgttgaaaaaggaaatatcttcccataaaaactagacggaagcattctcagaaacttatttgtgatgtgtttgctcaactaacaggattgaaccatcgttttgaaggagcagttttgaaacactgttttcgtggaatctgcaagtggatatttggctagctttgaggatttcgttggaaatgggattacatatacaaaggagacagcagcattctcagaaacttctttgtgatgtctgcattcaattcacagagttgagcattccctttcatagagcaggttggaaacactctttttgtagtatctggatgaggacatttggagcgctttctggcctatggtgaaaaaggaaatatcttcctgtaaaaactagacagaagcattctcagaagtttatttgtgatgtgtgccctcaactaacagagttgaacctttcttttgatagagcagttttgaaacactctttttgtaaaatctgcaagaggatatttggatagctttgaggatttcgttgcaaacgggaatggcttcatataaactctagacagaagcattctcagaaacttcgttgggatgtttcgattgaagtcccagtgttgaacattcccttttatagagcaggttggaaacactctttctgcattccctggaagtggacatttggagcgctttcaggacgacggtgaaaatggaaatatcttccaagaaaatctagatagaagcaatgtcagaaacttttatgtgatggatctactcagctaacagagttgaacctttcttttgagagagcagttttgcaacactctttttgtggaatatgcaagtggatattagggcagctttgaggatttcgttggaaacgggaatacatgtaaaaagcagacagcagcattctcagaaacttctttgtgatgtttgcattgaagtcacagagttgaacattccctttgagagagcaggtttgaaacacgccttttgtcatatctggaagtgtccattcggagcgcattcaggcttgtgttgaaaaaggaaatatcctcccataaaaactagacagataagcattctcagaaacttatctgtgatgtatgtactcaactaacaggaactaaaccatcgttttgaaggagcagttttgaaacactctttttgcggaatctgcaagtggatatttggctagctgggaggatttcgttggaaacgggattacatacaaaaagcagagagcagcattctcagaaacttctttgtgatgtttgcattcaagtcacagagttgaacattccctttcatagagcaggtttgaaacactctttttgtagtatctggatgtggacatttggatcgctttcaggcctatggtgaaaaaggaaatatcttcccatgaaaactagacagaagcattctcagaaacttattggtgatgtgtgccctcaactgacagtgttgaacctttgttttgatagagcagttctgaaacacactttttgtaaaatctgcaagaggatatttggatagctttgaggatttcgttggaaacgggaatgtcttcatgtaaactctagacagaagcattctcagaaactgctttgggatgtttcaattgaagtcccagtgttgaacattcccattcatagagcaggtttgaaacactctttttgtactatctggaagtggacatttggagcgctttcaggtctacggtgaaaaaggagatatcttccaataaaaactagatagaagcaatgtcagaacttttttcatgatgtatctactcagcaaacagagttgaacctttcttttgagagagcagttttgaaacactctttttgtggaatatgcaagtgggtattaggccagcttggaggatttcgttggaaacgggaatacgtataaaaagcagacagcagcattgtcagaaactactttgtgatgtttgcattcaagtcacagaactgaacactccctttcacagagcaggtttgaaacactctttttgtagtgtctgtaagtgaacatttggattgctttcaggcctaaggtgaaaaaggaaatatcttcccataaaaactagacagaagcattctcagaaacttgtttgtgatgtgtgccctctactgacagagttgaacctttctttgcaaagagcagttttgaaacactctttttgtagaatctgcaagaggatatttggatagctttgaggatttcttgggaaacgggaatgtcttcagataaactctagacagaagcatactcagaaacttctttgggacgtttcaattgaagtcacagtgttgaacattccctttcacagagcaggtttgaaacactctttttgtagtgtctataagtgaacatttggcgtgctttcaggcctaacgtgaaaaaggaaatatcttcccataaaaactagacagaagcattctcagaaacttgttcatgatgtgtgccctctactgacagagttgaacctttctttgcaaagagcagctttgaaacactctttttgtagaatctgcaagaggatatttggatagctttgaggatttcgttggaaacgggtatgtcttcagataaactgctagacagaagcattctcagaaacttctttgggatgttgcattcaagtcacagagtagaacattcccattcatagagcagatttgaaacactctttttgtagtatctggaagtggacatttggagcgctttcaggcctatgttgaaaaaggaaatatcttcccataaaaactagacggaaagcattctcagaaacttacttgtgatgtgtttgctcaactaacagaattgaaccatcgttttgaaggagcagttttgaaacactgttttcgtggaatctgcaagtggatatttggctagctttgaggatttcgttggaaacgggattacatatacaaaggagacagcagcattctcagaaacttctttgtgatgtctgcattcaattcacagagttgagcattccctttcatagagcaggttggaaacactctttttgtagtatctggatgaggacatttggagcgctttcaggcgtatggtgaaaaaggaaatatcttcccgtaaaaactagacagaagcattctcagaagtttatttctgatgtgtgccctcaactaacagagttgaacctttcttttgatagagcagttttgaaacactctttttgtaaaatctgcaagaggatatttggatagctttgaggatttcgttgcaaacgggaatggcttcatataaactctagacagaagcattctcagaaacttcgttgggatgtttcgattgaagtcccagtgttgaacattcccttttatagagcaggttggaaacactctttttgcattccctggaagtggacatttggagcgctttcaggacgacggtgaaaatggaaatatcttccaagaaaatctagatagaagcaacgtcagaaacttttctgtgatggatctactcagctaacagagttgaacctttcttttgagagagcagttttgcaacactctttttgtggaatatgcaagtggatattagggcagctttgaggatttcgttggaaacgggaatacatgtaaaaagcagacatcagcattctcagaaacttctttgtgatgtttgcattgaagtcacagagttgaacattccctttgagagagcaggtttgaaacacgccttttgtcatatctggaagtgtccattcggagcgcattcaggcttgtgttgaaaaaggaaatatcctcccataaaaactagacagaagcattctcagaaacttatctgtgatgtatgtactcaactaacagaactaaaccatcgttttgaaggagcagttttgaaacactctttttgcggaatctgcaagtggatatttggctagctgggaggatttcgttggaaacgggattacatacaaaaagcagacagcagcattctcagaaacttctttgtgatgtttgcattcaagtcacagagttgaacattccctttcatagagcaggtttgaaacactctttttgtagtatctggatgtggacatttggatcgctttcaggcctatggtgaaaaaggaaatatcttcccatgaaaactagacagaagcattctcagaaacttatttgtgatgtgtgccctcaactgacagtgttgaacctttgttttgatagagcagttctgaaacacactttttgtaaaatctgcaagaggatatttggatagctttgaggatttcgttggaaacgggaatgtcttcatgtaaactctacacagaagcattctcagaaactgctttgggatgtttcaattgaagtcccagtgttgaacattcccattcatagagcaggtttgaaacactctttttgtactatctggaagtggacatttggagcgctttcaggtcctacggtgaaaaaggagatatcttccaataaaaactagatagaagcaatgtcagaacttttttcatgatgtatctactcagcaaacagagttgaacctttcttttgagggagcagttttgaaacactatttttgtggaatatgcaagtgggtattaggccagcttggaggatttcgttggaaacgggaatacgtataaaaagcagacagcagcattgtcagaaactactttgtgatgtttgcattcaagtcacagaactgaacactccctttcacagagcaggtttgaaacactctttttgtagtgtctgtaagtgaacatttggattgctttcaggcctaaggtgaaaaaggaaatatcttcccataaaaactagacagaagcattctcagaaacttgtttgtgatgtgtgccctctactgacagagttgaacctttctttgcaaagagcagttttgaaacactctttttgtagaatctgcaagaggatatttggatagctttgaggatttcttgggaaacgggaatgtcttcagataaactctagacagaagcattctcagaaacttctttgggatgtttcaattgaagtcacagtgttgaacattccctttcacagagcaggtttgaaacactctttttgtagtgtctataattgaacatttggcgtgctttcaggcctaacgtgaaaaaggaaatatcttcccataaaaactagacagaagcattctcagaaacttgttcgtgatgtgtgccctctactgacagagttgaacctttctttgcaaagagcagctttgaaacactctttttgtagaatctgcaagaggatatgtggatagctttgaggatttcgttggaaacgggtatgtcttcagataaactctagacagaagcattctcagaaacttctttgggatgtttcaattgaagtcacagtgttgaacattccctttcacagagcaggtttgaaacactctttttgtagtgtctataagtgaacatttggcgtgctttcaggcctaacgtgaaaaaggaaatatcttcccataaaaactagacagaagcattctcagaaacttgttcatgatgtgtgccctctactgacagagttgaacctttctttgcaaagagcagctttgaaacactctttttgtagaatctgcaagaggatatttggatagctttgaggatttcgttggaaacgggtatgtcttcagataaactctagacagaagcattctcagaaacttctttgggatgttgcattcaagtcacagagtagaacattcccattcatagagtagatttgaaacactctttttgtagtatctggaagtggacatttggagcgctttcaggcctatgttgaaaaaggaaatatcttcccataaaaactagacggaagcattctcagaaacttacttgtgatgtgtttgctcaactaacagaattgaaccatcgttttgaaggagcagttttgaaacactgttttcgtggaatctgcaagtggatatttggctagctttgaggatttcgttggaaacgggattacatataaaaaggagacagcagcattctcagaaacttctttgtgatgtctgcattcaattcacagagttgagcattccctttcctagagcacgttggaaacactctttttgtagtatctggatgaggacatttggagcgctttcaggcgtatggtgaaaaaggaaatatcttcccgtaaaaactagacagaagcattctcagaaatttatttgtgatgtgtgccctcaactaacagagttgaacctttcttttgatagagcagttttgaaacactctttttgtaaaatctgcaagaggatatttggatagctttgaggatttcgttgcaaacgggaatggcttcatataaactctagacagaagcattctcagaaacttcgttgggatgtttcgattgaagtcccagtgttgaacattcccttttatagagcaggttggaaacactctttctgcattccctggaagtggacatttggagcgctttcaggacgacggtgaaaatggaaatatcttccaagaaaatctagatagaagcaacgtcagaaacttttatgtgatggatctactcagctaacagagttgaacctttcttttgagagagcagttttgcaacactctttttgtggaatatgcaaatggatattagggcagctttgaggatttcgttggaaacgggaatacatgtaaaaagcagacagcagcattctcagaaacttctttgtgatgtttgcattgaagtcacagagttgaacattccctttgagagagcaggtttgaaacacgccttttgtcatatctggaagtgtccattcggagcgcattcaggcttgtgttgaaaaaggaaatatcctcccataaaaactagagagaagcattctcagaaacttatctgtgatgtatgtactcaactaacagaactaaaccatcgttttgaaggagcagttttgaaacactctttttgcggaatctgcaagtggatatttggctagctgggaggatttcgttggaaacgggattacatacaaaaagcagacagcagcattctcagaaacttctttgtgatgtttgcattcaagtcacagagttgagcattccctttcatagagcaggtttgaaacactctttttgtagtatctggatgtggacatttggatcgctttcaggcctatggtgaaaaaggaaatatcttcccatgaaaactagacagaagcattctcagaaacttatttgcgatgtgtgccctcaactgacagtgttgaacctttgttttgatagagcagttctgaaacacactttttgtaaaatctgcaagaggatatttggatagctttgaggatttcgttggaaacgggaatgtcttcatgtaaactctggacagaagcattctcagaaactgctttgggatgtttcaattgaagtcccagtgttgaacattccctttcatagagcaggtttgaaacactctttttgtactatctggaagtggacatttggagcgctttcaggtctacggtgaaaaaggagatatcttccaataaaaactagatagaagcaatgtcagaacttttttcatgatgtatctactcagcaaacagagttgaaccttacttttgagagagcagttttgaaacactctttttgtggaatatgcaagtgggtattaggccagcttggaggatttcgttggaaacgggaatacgtataaaaagcagacagcagcattgtcagaaactactttgtgatgtttgcattcaagtcacagaattgaacactccctttcacagagcaggtttgaaacactctttttgtagtgtctgtaagtgaacatttggattgctttcaggcctaaggtgaaaaaggaaatatcttcccataaaaactagacagaagcattctcagaaacttgtttgtgatgtgtgccctctactgacagagttgaacctttctttgcaaagagcagttttgaaacactctttttgtagaatctgcaagaggatatttggatagctttgaggatttcttgggaaacgggaatgtcttcagataaactctagacagaagcattctcagtaaacttctttgggatgtttcaattgaagtcacagtgttgaacattccctttcacagagcaggtttgaaacactctttttgtagtgtctataagtgaacatttggcgtgctttcaggcgtaacgtgaaaaaggaaatatcttcccataaaaactagacagaagcattctcagaaacttgttcgtgatgtgtgccctctactgacagagttgaacctttctttgcaaagagcagctttgaaacactctttttgtagaatctgcaagaggatatttggatagctttgaggatttcgttggaaacgggtatgtcttcagataaactctagacagaagcattctcagaaacttctttgggatgttgcattcaagtcacagagtagaacattcccattcatagagcagatttgaaacactctttttgtagtatctggaagtggacatttggagcgctttcaggcctatgttgaaaaaggaaatatcttcccataaaaactagacggaagcattctcagaaacttacttgtgatgtgtttgctcaactaacagaattgaaccatcgttttgaaggagcagttttgaaacactgttttcgtggaatctgcaagtggatatttggctagctttgaggatttcgttggaaacgggattacatataaaaaggagacagcagcattctcagaaacttctttgtgatgtctgcattcaagtcacagagttgagcattccctttcatagagcaggttggaaacactctttttgtagtatctggatgaggacatttggagcgctttcaggcgtatggtgaaaaaggaaatatcttcccgtaaaaactagacagaagcattctcagaaatttatttgtgatgtgtgccctcaactaacagagttgaacctttcttttgatagagcagttttgaaacactctttttgtaaaatctgcaagaggatatttggatagctttgaggatttcgttgcaaacgggaatggcttcatataaaatctagacagaagcattctcagaaacttcgttgggatgtttcgattgaagtcccagtgttgaacattcccttttatagagcaggttggaaacactctttctgcattccctggaagtggacatttggagcgctttcaggacgacggtgaaaatggaaatatcttccaataaaatctagatagaagcaacgtcagaaacttttatgtgatggatctactcagctaacagagttgaacctttcttttgagagagcagttttgcaacactctttttgtggaatatgcaagtggatattagggcagctttgaggatttcgttggaaacgggaatacatgtaaaaagcagacagcagcattctcagaaacttctttgtgatgtttgcattgaagtcacagagttgaacattccctttgagagagcaggtttgaaacacgccttttgtcatatctggaagtgtccattcggagcgcattcaggcttgtgttgaaaaaggaaatatcctcccagaaaaactagacagaagcattctcagaaacttatttgtgatgtatgtactcaactaacagaactaaaccatcgttttgaaggagcagttttgaaacactctttttgcggaatctgcaagtggatatttggctagctgggaggatttcgttggaaacgggattacatacaaaaagcagacagcagcattctcagaaacttctttgtgatgtttgcattcaagtcacagagttgaaaattccctttcatagagcaggtttgaaacacactttttgtagtatctggatgtggacatttggatcgctttcaggcctatggtgaaaaaggaaatatcttcccatgaaaactagacagaagcattctcagaaacttatttgtgatgtgtgccctcaactgacagtgttgaacctttgttttgatagagcagttctgaaacacactttttggaaaatctgcaagaggatatttgcatagctttgaggattccgttggaaacgggaatgtcttcatgtaaactctagacagaagcattctcagaaactgctttgggatgtttcaattgaagtcccagtgttgaacattccctttcatagagcaggtttgaaacactctttttgtactatctggaagtggacatttggagcgctttcaggtctacggtgaaaaaggagatatcttctaataaaaactagatagaagcaatgtcagaacttttttcatgatgtatctactcagcaaacagagttgaacctttgttttgagagagcagttttgaaacactctttttgtggaatatgcaagtgggtattaggccagcttggaggatttcgttggaaacgggaatacgtataaaaagcagacagcagcattgtcagaaactactttgtgatgtttgcattcaagtcacagaattgaacactccctttcacagagcaggtttgaaacactctttttgtagtgtctgtaagtgaacatttggattgctttcacgcctaaggtgaaaaaggaaatatcttcccataaaaactagacagaagcattctcagaaacttgttcgtgatgtgtgccctctactgacagagttgaacctttctttgcaaagagcagttttgaaacactctttttgtagaatgtgcaagaggatatttggatagctttgaggatttcttgggaaacgggaatgtcttcagataaactctagacagaagcattctcagaaacttctttgggatgttgcattcaagtcacagagtagaacattcccattcatagagcagatttgaaacactctttttgtagtatctggaagtggacatttggagcgctttcaggcctatgttgaaaaaggaaatatcttcccataaaaactagacggaataattctcagaaacttacttgtgatgtgtttgctcaactaacagaattgaaccatcgttttgaaggagcagttttgaaacactgttttcgtggaatctgcaagtggatatttggctagctttgaggatttcgttggaaacgggattacatataaaaaggagacagcagcattatcagaaacttctttgtgatgattgcattcaagtcacagagttgaacattcgctttcatacagcaggtttgaaacactctttttgtagtatctggaagtggacatttggagcgctttgtggcctatggtgaaaaaggaaatatcttcccataaaaactagatagaagcattctcagaaacttgtttgtgatgtgtgtactcaactaacagagttgaacctttcttttgatagagcagttttgaagcactctttttgtagaatctgcaaggggatatttggatagctttgaggatttcgttggaaacgggaatatcttcatataaaatctagacagaagcattctcagaaacatctctgtgatgtttgcattcaagtcacagagttgaacattccctttcatagagcacgtttgaaacactctttttgtagtatctggaagtgcacatttggagcgcattgaggtctatggtgaaaaaggaaatatcttcccataaaaagaagacagannnnnnnnnnnnnnnnnnnnnnnnnnnnnnnnnnnnnnnnnnnnnnnnnnnnnnnnnnnnnnnnnnnnnnnnnnnnnnnnnnnnnnnnnnnnnnnnnnnntttccccttctcctcctgacttgtagacactgattgtcttccttggacttagggaaccccttaggttcttgaaaaattcaatgatcaggctatagtagatggtccccagtacacagcacaagattttttgataaactggacattttgaaacccaaataactaattagaaaaatcaaacatgtgaaactactttatcccatgcataggggttatactggaaataaaatgtacaacattggaatcctgaaggagaaaagtcctaaaagtttcaatatcaagaatcctgcacctgctgctacttatctagccttttgcttgatttctggctgatgaacttgcacaactcttgaaaacttaaaaacttgaaaatttgtcacttgaaaactacttgaaccaaactatgaaatctcacctgatatataagatgcaattgttacaattattttaaacttcaatttactgttttgctctatcaaaagaaagtttcaactctgttagttgagtacacacatcctaaacaagtttctgagaatgcttcagcattctcagtaaacttcgttgggatgtttcgattgaagtcccagtgttgaacattcccttttatagagcaggttggaaacactctttctgcattccctggaagtggacatttggagcgctttcaggacgacggtgaaaatggaaatatcttccaataaaatctagatagaagcaacgtcagaaacttttctgtgatggatctactcagctaacagagttgaacctttcttttgagagagcagttttgcaacactctttttgtggaatatgcaagtggatattagggcagctttgaggatttcgttggaaacgggaatacatgtaaaaagcagacagcagcattctcagaaacttctttgtgatgtttgcattgaagtcacagagttgaacattccctttgagaaagcaggtttgaaacacgccttctgtcatatctggaagtgtccattcggagcgcattcaggcttgtgttgagaaaggaaatatcctcccataaaaactagacagaagcattctgagaaacttatctgtgatgtatgtactcaactaacagaactaaaccaccgttttgaagaagcagtgttgaaacactctttttgcggaatctgcaagtggatatttgcctagcttggaggatttcgttggaaacgggattacatacaaaaagcagacagcagcattctcatgaacttctttgtgatgtttgcattcaagtcacagagttgaacattccctttcatagaacaggtttgaaacactctttttgtagtatctggatgtggacatttggatcgctttcaggcctatggtgaaaaaggaaatatcttcccatgaaaactagacagaagcattctcagaaacttatttgtgatgtgtgccctcaactgacagtgttgaacctttgttttgatagagcagttctgaaacacactttttgtaaaatctgcaagaggatatttggatagctttgaggatttcgttggaaacgggaatgtcttcatgtaaactctagacagaagcattctcagaaactgctttgggatgtttcaactgaagtcccagtgttgaacattcccattcatagagcaggtttgaaacactctttttgtactatctggaagtggacatttggagcgctttcaggtctacggtgaaaaaggagatatcttccaataaaaactagatagaagcaatgtcagaacgtttttcatgatgtatctactcagcaaacagagttgaacctttcttttgagagagcagttttgacacagtctttgtggaatatgcaagtgggtattaggccagcttggaggatttcgttggaaacgggaatacgtataaaaagcagacagcagcattgtcagaaactactttgtgatgtttgcattcaagtcacagaattgaacactccctttcacagagcaggtttgaaacactctttttgtagtgtctgtaagtgaacatatggattgctttcaggcctaaggtgaaaaaggaaatatcttcccataaaaactagacagaagcattctcagaaacttgtttgtgatgtgtgccctctactgacagagttgaacctttctttgcaaagagcagttttgaaacactctttttgtagaatctgcaagaggatatttggatagctttgaggatttcttgggaaacgggaatgtcttcagataaactctagacagaagcattctcagaaacttctttgggatgtttcaattgaagtcacagtgttgaacattccctttcacagagcaggtttgaaacactctttttgtagtgtctataagtgaacatttggcgtgctttcaggcctaacgtgaaaaaggaaatatcttcccataaaaactagacagaagcattctcagaaacttgttcgtgatgtgtgccctctactgacagacttgaacctttctttgcaaagagcagctttgaaacattctttttgtagaatctgcaagaggatatttggatagctttgaggatttcgttggaaacgggtatgtcttcagataaactctagacagaagcattctcagaaacttctttgggatgttgcattcaagtcacagagtagaacattcccattcatagagcagatttgaaacactctttttgtagtatctggaagtgtacatttggagcgctttcaggcctatgttgaaaaaggaaatatcttcccataaaaactagacggaagcattctcagaaacttacttgtgatgtgtttgctcaactaacagaattgaaccatcgttttgaaggagcagttttgaaacactgttttcgtggaatctgcaagtggatatttggctagctttgaggatttcgttggaaacgggattacatataaaaaggagacagcagcattctcagaaacttctttgtgctgtctgcattcaagtcacagagttgagcattccctttcatagagcaggttggaaacactctttttgtagtatctggatgaggacatttggagcgctttcaggcgtatggtgaaaaaggaaatatcttcccgtaaaaactagacagaagcattctcagaaatttatttgtgatgtgtgccctcaactaacagagttgaacctttcttttgatagagcagttttgaaacactctttttgtaaaatctgcaagaggatatttggatagctttgaggatttcgttgcaaacgggaatggcttcatataaactctagacagaagcattctcagaaacttcgttgggatgtttcgattgaagtcccagtgttgaacattcccttttatagagcaggttggaaacactctttctgcattccctggaagtggacatttggagcgctttcaggacgacggtgaaaatggaaatatcttccaagaaaatctagatagaagcaatgtcagaaacttttatgtgatggatctactcagctaacagagttgaacctttcttttgagagagcagttttgcaacactctttttgtggaatatgcaagtggatattagggcagctttgaggatttcgttggaaacgggaatacatgtaaaaagcagacagcagcattctcagaaacttctttgtgatgtttgcattgaagtcacagagttgaacattccctttgagagagcaggtttgaaacacgccttttgtcatatctggaagtgtccattcggagcgcattcaggcttgtgttgaaaaaggaaatatcctcccataaaaactagacagaagcattctcagaaacttatctgtgatgtatgtactcaactaacagaactaaaccatcgttttgaaggagcagttttgaaacactctttttgcggaatctgcaagtggatatttggctagctgggaggatttcgttggaaacgggattacatacaaaaagcagacagcagcattctcagaaacttctttgtgatgtttgcattcaagtcacagagttgaacattccctttcatagagcaggtttgaaacactctttttgtagtatctggatgtggacatttggatcgctttcaggcctatggtgaaaaaggaaatatcttcacatgaaaactagacagaagcattctcagaaatttatttgtgatgtgtgccctcaactaacagagttgaacctttcttttgatagagcagttttgaaacactctttttgtaaaatctgcaagaggatatttggatagctttgaggatttcattgcaaacgggaatggcttcatataaactctagacagaagcattctcagaaacttcgttgggatgtttcgattgaagtcccagtgttgaacattcccttttatagagcaggttggaaacactctttctgcattccctggaagtggacatttggagcgctttcaggacgacggtgaaaatggaaatatcttccaagaaaatctagatagaagcaatgtcagaaacttttatgtgatggatctactcagctaacagagttgaacctttcttttgagagagcagttttgcaacactctttttgtggaatatgcaagtggatattagggcagctttgaggatttcgttggaaacgggaatacatgtaaaaagcagacagcagcattctcagaaacttctttgtgatgtttgcattgaagtcacagagttgaacattccctttgagagagcaggtttgaaacacgccttttgtcatatctggaagtgtccattcggagcgcattcaggcttgtgttgaaaaaggaaatatcctcccataaaaactagacagaagcattctcagaaacttatctgtgatgtatgtactcaactaacagaactaaaccatcgttttgaaggagcagttttgaaacactctttttgcggaatctgcaagtggatatttggctagctgggaggatttcgttggaaacgggattacatacaaaaagcagacagcagcattctcagaaacttctttgtgatgtttgcattcaagtcacagagttgaacattccctttcatagagcaggtttgaaacactctttttgtagtatctggatgtggacatttggatcgctttcaggcgtatggtgaaaaaggaaatatcttcccatgaaaactagacagaagcattctcagaaacttatttgtgatgtgtgccctcaactgacagtgttgaacctttgttttgatagagcagttctgaaacacactttttgtaaaatctgcaagaggatatttggatagctttgaggatttcgttggaaacgggaatgtcttcatgtaaactctacacagaagcattctcagaaactgctttgggatgtttcaattgaagtcccagtgttgaacattcccattcatagagcaggtttgaagcactctttttgtactatctggaagtggacatttggagcgctttcaggtctacggtgaaaaaggagatatcttccaataaaaactagatagaagcaatgtcagaacttttttcatgatgtatctactcagcaaacagagttgaacctttcttttgagagagcagttttgaaacactctttttgtggaatatgaaagtgggtattaggccagcttggaggatttcgttggaaacgggaatacgtataaaaagcagacagcagcattgtcagaaactactttgtgatgtttgcattcaagtcacagaactgaacactccctttcacagagcaggtttgaaacactctttttgtagtgtctgtaagtgaacatttgtattgctttcaggcctaaggtgaaaaaggaaatatcttcccataaaaactagacagaagcattctcagaaacttgtttgtgatgtgtgccctctactgacagagttgaacctttctttgcaaagagcagttttgaaacactctttttgtagaatctgcaagaggatatttggatagctttgaggatttcttgggaaacgggaatgtcttcagataaactctagacagaagcattctcagaaacttctttgggatgtttcaattgaagtcacagtgttgaacattccctttcacagagcaggtttgaaacactctttttgtagtgtctataagtgaacatttggcgtgctttcaggcctaacgtgaaaaaggaaatatcttcccataaaaactagacagaagcattctcagaaacttgttcttgatgtgtcccctctactgacagagttgaacctttctttgcaaagagcagctttgaaacactctttttgtagaatctgcaagaggatatttggatagcttggaggatttcgttggaaacgggtatgtcttcagataaactctagacagaagcattctcagaaacttctttgggatgttgcattcaagtcacagagtagaacattcccattcatagagcagatttgaaacactctttttgtagtatctggaagtggacatttggagcgctttcaggcctatgttgaaaaaggaaatatcttcccataaaaactagacggaaagcattctcagaaacttatttgtgatgtgtttgctcaactaacaggattgaaccatcgttttgaaggagcagttttgaaacactgttttcgtggaatctgcaagtggatatttggctagctttgaggatttcgttggaaacgggattacatatacaaaggagacagcagcattctgagaaacttctttgtgatgtctgcattcaagtcacagagttgagcattccctttcatagagcaggttggaaacactctttttgtagtatctggatgaggacatttggagcgctttcaggcgtatggtgaaaaaggaaatatcttcccgtaaaaactagacagaagcattctcagaaatttatttgtgatgtgtgccctcaactaacagagttgaacctttcttttgatagagcagttttgaaacactctttttgtaaaatctgcaagaggatatttggatagctttgaggatttcgttgcaaacgggaatggcttcatataaactctagacagaagcattctcagaaacttcgttgggatgtttcgattgaagtcccagtgttgaacattcccttttatagagcaggttggaaacactctttctgcattccctggaagtggacatttggagcgctttcaggacgacggtgaaaatggaaatatcttccaagaaaatctagatagaagcaatgtcagaaacttttatgtgatggatctactcagctaacagagttgaacctttcttttgagagagcagttttgcaacactctttttgtggaatatgcaagtggatattagggcagctttgaggatttcgttggaaacgggaatacatgtaaaaagcagacagcagcattctcagaaacttctttgtgatgtttgcattgaagtcacagagttgaacattccctttgagagagcaggtttgaaacacgccttttgtcatatctggaagtgtccattcggagcgcattcaggcttgtgttgaaaaaggaaatatcctcccagaaaaactagacagaagcattctcagaaacttatctgtgatgtatgtactcaactaacagaactaaaccatcgttttgaaggagcagttttgaaacactctttttgcggaatctgcaagtggatatttggctagctgggaggatttcgttggaaacgggattacatacaaaaagcagacagcagcattctcagaaacttctttgtgatgtttgcattcaagtcacagagttgaacattccctttcatagagcaggtttgaaacactctttttgtagtatctggatgtggacatttggatcgctttcaggcctatggtgaaaaaggaaatatcttcccatgaaaactagacagaagcattctcagaaacttatttgtgatgtgtgccctcaactgacagtgttgaacctttgttttgatagagcagttctgaaacacactttttgtaaaatctgcaagaggatatttggatagctttgaggatttcgttggaaacgggaatgtcttcatgtaaactttacacagaagcattctcagaaactgctttgggatgtttcaattgaagtcccagtgttgaacattcccattcatagagcaggtttgaaacactctttttgtactatctggaagtggacatttggagcgctttcaggtctacggtgaaaaaggagatatcttccaataaaaactagatagaagcaatgtcagaacttttttcatgatgtatctactcagcaaacagagttgaacctttcttttgagagagcagttttgaaacactctttttgtggaatatgcaagtgggtattaggccagcttggaggatttcgttggaaacgggaatacgtataaaaagcagacagcagcattgtcagaaactactttgtgatgtttgcattcaagtcacagaattgaacactccctttcacagagcaggtttgaaacactctttttgtagtgtctgtaagtgaacatttggattgctttcaggcctaaggtgaaaaaggaaatatcttcccataaaaactagacagaagcattctcagaaacttgtttgtgatgtgtgccctctactgacagagttgaacctttctttgcaaagagcagttttgaaacactctttttgtagaatctgcaagaggatatttggatagctttgaggatttcttgggaaacgggaatgtcttcagataaactctagacagaagcattctcagaaacttctttgggatgtttcaattgaagtcacagtgttgaacattccctttcacagagcaggtttcaaacactctttttgtagtgtctataagtgaacatttggcgtgctttcaggcctaacgtgaaaaaggaaatatcttcccataaaaactagacagaagtattctcagaaacttgttcgtgatgtgtgccctctactgacagagttgaacctttctttgcaaagagcagctttgaaacacactttttgtagaatctgcaagaggatatttggatagctttgaggatttcgttggaaacgggtatgtcttcagataaactctagacagaagcattctcagaaacttctttgggatgttgcattcaagtcacagagtagaacattcccattcatagagcagatttgaaacactctttttgtagtatctggaagtggacatttggagcgctttcaggcctatgttgaaaaaggaaatatcttcccataaaaactagacggaagcattctcagaaacttatttgtgatgtgtttgctcaactaacaggattgaaccatcgttttgaaggagcagttttgaaacactgttttcgtggaatctgcaagtggatatttggctagctttgaggatttcgttggaaacgggattacatataaaaaggagacagcagcattctcagaaacttctttgtgatgtctgcattcaattcacagagttgagcattccctttcatagagcaggttggaaacactctttttgtagtatctggatgaggacatttggagcgctttcaggcgtatggtgaaaaaggaaatatcttcccgtaaaaactagacagaagcattctcagaaatttatttgtgatgtgtgccctcaactaacagagttgaacctttcttttgatagagcagttttgaaacactctttttgtaaaatctgcaagaggatatttggatagctttgaggatttcgttgcaaacgggaatggcttcatataaactctagacagaagcattctcagaaacttcgttgggatgtttcgattgaagtcccagtgttgaacattcccttttatagagcaggttggaaacactctttctgcattccctggaagtggacatttggagcgctttcaggacgacggtgaaaatggaaatatcttccaagcaaaatctagatagaagcaacgtcagaaacttttatgtgatggatctactcagctaacagagttgaacctttcttttgagagagcagttttgcaacactctttttgtggaatatgcaagtggatattagggcagctttgaggatttcgttggaaacgggaatacatgtaaaaagcagacagcagcattctcagaaacttctttgtgatgtttgcattgaagtcacagagttgaacattccctttgagagagcaggtttgaaacacgccttttgtcatatctggaagtgtccattcggagcgcattcaggcttgtgttgaaaaaggaaatatcctcccataaaaactagacagaagcattctcagaaacttatctgtgatgtatgtactcaactaacagaactaaaccatcgttttgaaggagcagttttgaaacactctttttgcggaatctgcaagtggatatttggctagctgggaggatttcgttggaaacgggattacatacaaaaagcagacagcagcattctcagaaacttctttgtgatgtttgcattcaagtcacagagttgaacattccctttcatagagcaggtttgaaacactctttttgtagtatctggatgtggacatttggatcgctttcaggcctatggtgaaaaaggaaatatcttcccatgaaaactagacagaagcattctcagaaacttatttgtgatgtgtgccctcaactgacagtgttgaacctttgttttgatagagcagttctgaaacacactttttgtaaaatctgcaagaggatatttggatagctttgaggatttcgttggaaacgggaatgtcttcatgtaaactctagacagaagcattctcagaaactgctttgggatgtttcaattgaagtcccagtgttgaacattccctttcatagagcaggtttgaaacactctttttgtactatctggaagtggacatttggagcgctttcaggtctacggtgaaaaaggagatatcttccaataaaaactagatagaagcaatgtcagaacttttttcatgatgtatctactcagcaaacagagttgaacctttcttttgagagagcagttttgaaacactctttttgtggaatatgcaagtgggtattaggccagcttggaggatttcgttggaaacgggaatacgtataaaaagcagacagcagcattgtcagaaactactttgtgatgtttacattcaagtcacagaactgaacactccctttcacagagcaggtttgaaacactctttttgtagtgtctgtaagtgaacatttggattgctttcaggcctaaggtgaaaaaggaaatgtcttcccataaaaactagacagaagcattctcagaaacttgtttgtgatgtgtgccctctactgacagagttgaacctttctttgcaaagaccagttttgaaacactctttttgtagaatctgcaagaggatatttggatagctttgaggatttcttgggaaacgggaatgtcttcagataaactctagacagaagcattctcagaaacttctttgggatgtttcaattgaagtcacagtgttgaacattccctttcacagagcaggtttgaaacactctttttgtagtgtctataagtgaacatttggcgtgctttcaggcctaacgtgaaaaaggaaatatcttcccataaaaactagacagaagcattctcagaaacttgttcgtgatgtgtgccctctactgacagagttgaacctttctttgcaaagagcagctttgaaacactctttttgtagaatctgcaagaggatatttggatagctttgaggatttcgttggaaacgggtatgtcttcagataaactctagacagaagcattctcagaaacttctttgggatgttgcattcaagtcacagagtagaacattcccattcatagagcagatttgaaacactcttttgtagtatctggaagtggacatttggaacgctttcaggcctatgttgaaaaaggatatatcttcccataaaaactagacggaagcattctcagaaacttacttgtgatgtgtttgctcaactaacagaattgaaccatcgttttgaaggagcagttttgaaacactgttttcgtggaatctgcaagtggatatttggctagctttgaggatttcgttggaaacgggattacatataaaaaggagacagcagcattctcagaaacttctttatgatgtctgcattcaagtcacagagttgagcattccctttcatagagcaggttggaaacactctttgtgtagtatctggatgaggacatttggagcgctttcaggcgtatggtgaaaaaggaaatatcttcccgtaaaaactagacagaagcattctcagaaatttatttgtgatgtgtgccctcaactaacagagttgaacctttcttttgatagagcagttttgaaacactctttttgtaaaatctgcaagaggatatttggagagctttgaggatttcgttgcaaacgggaatggcttcatataaactctagacagaagcattctcagaaacttcgttgggatgtttcgattgaagtcccagtgttgaacattcccttttatagagcaggttggaaacactctttttgcattccctggaagtggacatttggagcgctttcaggacgacggtgaaaatggaaatatcttccaataaaatctagatagaagccatgtcagaaacttttatgtgatggatctactcagctaacagagttgaacctttcttttgagagagcagttttgcaacactctttttgtggaatatgcaagtggatattagggcagctttgaggatttcgttggaaacgggaatacatgtaaaaagcagacagcagcattctcagaaacttctttgtgatgtttgcattgaagtcacagagttgaacattccctttgagagagcaggtttgaaacatgccttttgtcatatctggaagtgtccattcggagcgcattcaggcttgtgttgaaaaaggaaatatcctcccataaaaactagacagaagcattctcagaaacttatctgtgatgtatgtactcaactaacagaactaaaccatcgttttgaaggagcagttttgaaacactctttttgcggaatctgcaagtggatatttggctagctgggaggatttcgttggaaacgggattacatacaaaaagcagacagcagcattctcagaaacttctttgtgatgtttgcattcaagtcacagagttgaacattccctttcatagagcaggtttgaaacactctttttgtagtatctggatgtggacatttggatcgctttcaggcctatggtgaaaaaggaaatatcttcccatgaaaactagacagaagcattctcagaaacttatttgtgatgtgtgccctcaactgacagtgttgaacctttgttttgatagagcagttctgaaacacactttttgtaaaatctgcaagaggatatttggatagctttgaggatttcgttggaaacgggaatgtcttcatgtaaactctagacagaagcattctcagaaactgctttgggatgtttcaattgaagtcccagtgttgaacattccctttcatagagcaggtttgaaacactctttttgtactatctggaagtggacatttggagcgctttcaggtctacggtgaaaaaggagatatcttccaataaaaactagatagaagcaatgtcagaacttttttcatgatgtatctactcagcaaacagagttgaacctttcttttgagagagcagttttgaaacactctttttgtggaatatgcaagtgggtattaggccagcttgaaggatttcgttggaaacgggattacgtataaaaagcagacagcagcattgtcagaaactactttgtgatgtttgcattcaagtcacagaattgaacactccctttcacagagcaggtttgaaacactctttttgtagtgtctgtaagtgaacatatggattgctttcaggcctaaggtgaaaaaggaaatatcttcccataaaaactagacagaaagcattctcagaaacttgtttgtgatgtgtgccctctactgacagagttgaacctttctttgcaaagagcagttttgaaacactctttttgtagaatctgcaagaggatatttggatagctttgaggatttcttgggaaacgggaatgtcttcagataaactctagacagaagcattctcagaaacttctttgggatgtttcaattgaagtcacagtgttgaacattccctttcacagagcaggtttgaaacactctttttgtagtgtctataagtgaacatttggcgtgctttcaggcctaacgtgaaaaaggaaatatcttcccataaaaactagacagaagcattctcagaaacttgttcttgatgtgtcccctctactgacagagttgaacctttctttgcaaagagcggctttgaaacactctttttgtagaatctgcaagaggatatttggatagcttggaggttttcgttggaaacgggtatgtcttcagataaactctagacagaagcattctcagaaacttctttgggatgttgcattcaagtcacagagtagaacattcccattcatagagcagatttgaaacactctttttgtagtatctggaagtggacatttggagcgctttcaggcctatgttgaaaaaggaaatatcttcccataaaaactagacggaagcattctcagaaacttacttgtgatgtgtttgctcaactaacagaattgaaccatcgttttgaaggagcagttttgaaacactgttttcgtggaatctgcaagtggatatttggctagctttgaggatttcgttggaaacgggattacatataaaaaggagacagcagcattctcagaaacttctttgtgatgtctgcattcaagtcacagagttgagcattccctttcatagagcaggttggaaacactctttgtgtagtatctggatgaggacatttggagcgctttcaggcgtatggtgaaaaaggaaatatcttcccgtaaaaactagacagaagcattctcagaaatttatttgtgatgtgtgccctcaactaacagagttgaacctttcttttgatagagcagttttgaaacactctttttgtaaaatctgcaagaggatatttggatagctttgaggatttcgttgcaaacgggaatggcttcatataaactctagacagaagcattctcagaaacttcgttgggatgtttcgattgaagtcccagtgttgaacattcccttttatagagcaggttggaaacactctttctgcattccctggaagtggacatttggagcgctttcaggacgacggtgaaaatggaaatatcttccaagaaaatctagatagaagcaatgtcagaaacttttctgtgatggatctactcagctaacagagttgaacctttcttttgagagagcagttttgcaacactctttttgtggaatatgcaagtggatattagggcagctttgaggatttcgttggaaacgggaatacatgtaaaaagcagacagcagcattctcagaaacttctttgtgatgtttgcattgaagtcacagagttgaacattccctttgagagagcaggtttgaaacacgccttttgtcatatctggaggtgtccattcggagcgcattcaggcttgttttgaaaaaggaaatatcctcccagaaaaactagacagaagcattctcagaaacttatctgtgatgtatgtactcaactaacagaactaaaccatcgttttgaaggagcagttttgaaacactctttttgcggaatctgcaagtggatatttggctagctgggaggatttcgttggaaacgggattacatacaaaaagcagacagcagcattctcagaaactactttgtgatgtttgcattcaagtcacagagttgaacattccctttcatagagcaggtttgaaacactctttttgaagtatctggatgtggacatttggatcgctttcaggcctatggtgaaaaaggaaatatcttcccatgaaaactagacagaagcattctcagaaacttatttgtgatgtgtgccctcaactgacagtgttgaacctttgttttgatagagcagttctgaaacacactttttgtaaaatctgcaagaggatatttggatagctttgaggatttcgttggaaacgggaatgtcttcatgtaaactctagacagaagcattctcagaaactgctttgggatgtttcaattgaagtcccagtgttgaacattccctttcatagagcaggtttgaaacactctttttgtactatctggaagtggacatttggagcgctttcaggtctacggtgaaaaaggagatatcttccaataaaaactagatagaagcaatgtcagaacttttttcatgatgtatctactcagcaaacagagttgaacctttcttttgagagagcagttttgaaacactccttttgtggaatatgcaagtgggtattaggccagcttggaggatttcgttggaaacgggattacgtataaaaagcagacagcagcattgtcagaaactactttgtgatgtttgcattcaagtcacagaattgaacactccctttcacagagcaggtttgaaacactctttttgtagtgtctgtaagtgaacatttggattgatttcaggcctaaggtgaaaaaggaaatatcttcccataaaaactagacagaagcattctcagaaacttgtttgtgatgtgtgccctctactgacagagttgaacctttctttgcaaagagcagttttgaaacactctttttgtagaatctgcaagaggatatttggatagctttgaggatttcttgggaaacgggaatgtcttcagataaactctagacagaagcattctcagaaacttctttgggatgtttcaattgaagtcacagtgttgaacattccctttcacagagcaggtttgaaacactctttttgtagtgtctataagtgaacatttggcgtgctttcaggcgtaacgtgaaaaaggaaatatcttcccataaaaaccagacagaagcattctcagaaacttgtttgtgatgtgtgccctctactgacagagttgaacctttctttgcaaagagcagctttgaaacactctttttgtagaatctgcaagaggatatgtggatagctttgaggatttcgttggaaacgggtatgtcttcagataaactctagacagaagcattctcagaaacttctttgggatgtttcaattgaagtcacagtgttgaacattccctttcacagagcaggtttgaaacactctttttgtagtgtctataagtgaacatttggcgtgctttcaggcctaacgtgaaaaaggaaatatcttcccataaaaactagacagaagcattctcagaaacttgttcttgatgtgtcccctctactgacagagttgaacctttctttgcaaagagcagctttgaaacactctttttgtagaatctgcaagaggatatttggatagcttggaggagttcgttggaaacgggtatgtcttcagataaactctagacagaagcattctcagaaacttctttgggatgttgcattcaagtcacagagtagaacattcccattcatagagcagatttgaaacactctttttgtagtatctggaagtggacatttggagcgctttcaggcctatgttgaaaaaggaaatatcttcccataaaaactagacggaagcattctcagaaacttacttgtgatgtgtttgctcaactaacagaattgaaccatcgttttgaaggagcagttttgaaacactgttttcgtggaatctgcaagtggatatttggctagctttgaggatttcgttggaaacgggattacatataaaaaggagacagcagcattctcagaaacttctttgtgatgtctgcattcaattcacagagttgagcattccctttcatagagcaggttggaaacactctttttgtagtatctggatgaggacatttggagcgctttcaggcgtatggtgaaaaaggaaatatcttcccgtaaaaactagacagaagcattctcagaaatttatttgtgatgtgtgccctcaactaacagagttgaacctttcttttgatagagcagttttgaaacactctttttgtaaaatctgcaagaggatatttggatagctttgaggatttcgttgcaaacgggaatggcttcatataaactctagacagaagcattctcagaaacttcgttgggatgtttcgattgaagtcccagtgttgaacattcccttttatagagcaggttggaaacactctttctgcattccctggaagtggacatttggagcgctttcaggacgacggtgaaaatggaaatatcttccaagaaaatctagatagaagcaacgtcagaaacttttctgtgatggatctactcagctaacagagttgaacctttcttttgagagagcagttttgcaacactctttttgtggaatatgcaagtggatattagggcagctttgaggatttcgttggaaacgggaatacatgtaaaaagcagacagcagcattctcagaaacttctttgtgatgtttgcattgaagtcacagagttgaacattccctttgagagagcaggtttgaaacacgccttttgtcatatctggaagtgtccattcggagcgcattcaggcttgtgttgaaaaaggaaatatcctcccataaaaactagacagaagcattctcagaaacttatctgtgatgtatgtactcaactaacagaactaaaccatcgttttgaaggagcagttttgaaacactctttttgcggaatctgcaagtggatatttggctagctgggggatttcgttggaaacgggattacatacaaaaagcagacagcagcattctcagaaacttctttgtgatgtttgcattcaagtcacagagttgaacattccctttcatagagcaggtttgaaacactctttttgtagtatctggatgtggacatttggatcgctttcaggcctatggtgaaaaaggaaatatcttcacatgaaaactagacagaagcattctcagaaacttattggtgatgtgtgccctcaactgacagtgttgaacctttgttttgatagagcagttctgaaacacactttttgtaaaatctgcaagaggatatttggatagctttgaggatttcgttggaaacgggaatgtcttcatgtaaactctacacagaagcattctcagaaactgctttgggatgtttcaattgaagtcccagtgttgaacattcccattcatagagcaggtttgaaacactctttttgtactatctggaagtggacatttggagcgctttcaggtctacggtgaaaaaggagatatcttccaataaaaactagatagaagcaatgtcagaacttttttcatgatgtatctactcagcaaacagagttgaacctttcttttgagagagcagttttgaaacactctttttgtggaatatgcaagtgggtattaggccagcttggaggatttcgttggaaacgggaatacgtataaaaagcagacagcagcattgtcagaaactactttgtgatgtttgcattcaagtcacagaattgaacactccctttcacagagcaggtttgaaacactctttttgtagtgtctgtaagtgaacttttggattgctttcaggcctaaggtgaaaaaggaaatatcttcccataaaaactagacagaagcattctcagaaacttgtttgtgatgtgtgccctctactgacagagttgaacctttctttgcaaagagcagttttgaaacactctttttgtagaatctgcaagaggatatttggatagctttgaggatttcttgggaaacgggaatgtcttcagataaactctagacagaagcattctcagaaacttctttgggatgtttcaattgaagtcacagtgttgaacattccctttcacagagcaggtttgaaacactctttttgtagtgtctataagtgaacatttggcgtgctttcaggcctaacgtgaaaaaggaaatatcttcccataaaaactagacagaagcattctcagaaacttgttcgtgatgtgtgccctctactgacagagttgaacctttctttgcaaagagcagatttgaaacacactttttgtagaatctgcaagaggatatttggatagctttgaggatttcgttggaaacgggtatgtcttcagataaactctagacagaagcattctcagaaacttctttgggatgttgcattcaagtcacagagtagaacattcccattcatagagcagatttgaaacactctttttgtagtatctggaagtggacatttggagcgctttcaggcctatgttgaaaaaggaaatatcttcccataaaaactagacggaagcattctcagaaacttacttgtgatgtgtttgctcaactaacagaattgaaccatcgttttgaaggagcagttttgaaacactgttttcgtggaatctgcaagtggatatttggctagctttgaggatttcgttggaaacgggattacatataaaaaggagacagcaagcattctcagaaacttctttgtgatgtctaaattcaagtcacagagttgagcattccctttcatagagcaggttggaaacactctttttgtagtatctggatgaggacatttggagcgctttcaggcctatggtgaaaaaggaaatatcttcccgtaaaaactagacagaagcattctcagaagtttatttgtgatgtgtgccctcaactaacagagttgaacctttcttttgatagagcagttttgaaacactctttttgtaaaatctgcaagaggatatttggatagctttgaggatttcgttgcaaacgggaatggcttcatataaactctagacagaagcattctcagaaacttcgttgggatgtttcgattgaagtcccagtgttgaacattcccttttatagagcaggttggaaacactctttctgcattccctggaagtggacatttggagcgctttcaggacgacggtgaaaatggaaatatcttccaagaaaatctagatagaagcaacgtcagaaacttttctgtgatggatctactcagctaacagagttgaacctttcttttgagagagcagttttgcaacactctttttgtggaatatgcaagtggatattagggcagctttgaggatttcgttggaaacgggaatacatgtaaaaagcagacagcagcattctcagaaacttctttgtgatgtttgcattgaagtcacagagttgaacattccctttgagagagcaggtttgaaacacgccttttgtcatatctggaagtgtccattcggagcgcattcaggcttgtgttgaaaaagaaaatatcctcccataaaaactagacagaagcattctcagaaacttatttgtgatgtatgtactcaactaacagaactaaaccatcgttttgacggagcagttttgaaacactctttttgcggaatctgcaagtggatatttggctagctgggaggatttcgttggaaacgggattacatacaaaaagcagagagcagcattctcagaaacttctttgtgatgtttgcattcaagtcacagagttgaacattccctttcatagagcaggtttgaaacactctttttgtagtatctggatgtggacatttggatcgctttcaggcctatggtgaaaaaggaaatatcttcccatgaaaactagacagaagcattctcagaaacttatttgtgatgtgtgccctcaactgacagtgttgaacctttgttttgatagagcagttctgaaacacactttttgtaaaatctgcaagaggatatttggatagctttgaggatttcgttggaaacgggaatgtcttcatgtaaactctagacagaagcattctcagaaactgctttgggatgtttcaattgaagtcccagtgttgaacattccctttcatagagcaggtttgaaacactctttttgtactatctggaagtggacatttggagcgctttcaggtctacggtgaaaaagcagatatcttccaataaaaactagatagaagcaatgtcagaacttttttcatgatgtatctactcagcaaacagagttgaacctttcttttgagagagcagttttgaaacactccttttgtggaatatgcaagtgggtattaggccagcttggaggatttcgttggaaacgggaatacgtataaaaagcagacagcagcattgtcagaaactactttgtgatgtttgcattcaagtcacagaattgaacactccctttcacagagcaggtttgaaacactctttttgtagtgtctgtaagtgaacatttggattgatttcaggcctgaggtgaaaaaggaaatatcttcccataaaaactagacagaagcattctcagaaacttgtttgtgatgtgtgccctctactgacagagttgaacctttctttgcaaagagcagttttgaaacactctttttgtagaatctgcaagaggatatttggatagctttgaggatttcttgggaaacgggaatgtcttcagataaactctagacagaagcattctcagaaacttctttgggatgtttcaattgaagtcacagtgttgaacattccctttcacagagcaggtttgaaacactctttttgtagtgtctataagtgaacatttggcgtgctttcaggcctaacgtgaaaaaggaaatatcttcccataaaaactagacagaagcattctcagaaacttgttcgtgatgtgtgccctctactgacagagttgaacctttctttgcaaagagcagctttgaaacactctttttgtagaatctgcaagaggatatttggatagctttgaggatttcgttggaaacgggtatgtcttcagataaactctagatagaagcattctcagaaacttctttgggatgttgcattcaagtcacagagtagaacattcccattcatagagcagatttgaaacactctttttgtagtatctggaagtggacatttggagcgctttcaggcctatgttgaaaaaggaaatatcttcccataaaaactagacggaagcattctcagaaacttatttgtgatgtgtttgctcaactaacaggattgaaccatcgttttgaaggagcagttttgaaacactgttttcgtggaatctgcaagtggatatttggctagctttgaggatttcgttggaaacgggattacatataaaaaggagacagcagcattctcagaaacttctttgtgatgtttgcattcaattcacagagttgagcattccctttcatagagcaggttggaaacactctttttgtagtatctggatgtggacatttggatcgctttcaggcctatggtgaaaaaggaaatatcttcccatgaaaactagacagaagcattctcagaaacttatttgtgatgtgtgccctcaactgacagtgttgaacctttgttttgatagagcagttctgaaacacactttttgtaaaatctgcaagaggatatttggatagctttgaggatttcgttggaaacgggaatgtcttcatgtaaactctagacagaagcattctcagaaactgctttgggatgtttcaattgaagtcccagtgttgaacattccctttcatagagcaggtttgaaacactctttttgtactatctggaagtggacatttggagcgctttcaggtctacggtgaaaaaggagatatcttccaataaaaactagatagaagcaatgtcagaacttttttcgtgatgtatctactcagcaaacagagttgaacatttcttttgagagagcagttttgaaacactctttttgtggaatatgcaagtgggtattaggccagcttggaggatttcgttggaaacgggaatacgtataaaaagcagacagcagcattgtcagaaactactttgtgatgtttgcattcaagtcacagaattgaacactccctttcacagagcaggtttgaaacactctttttgtagtgtctgtaagtgaacatttggattgctttcaggcctaaggtgaaaaaggaaatatcttcccataaaaactagacagaagcattctcagaaacttgtttgtgatgtgtgccctctactgacagagttgaacctttctttgcaaagagcagctttgaaacactctttttgtagaatctgcaagaggatatttggatagctttgaggatttcttgggaaacgggaatgtcttcagataaactctagacagaagcattctcagaaacttctttgggatgtttcaattgaagtcacagtgttgaacattccctttcacagagcaggtttgaaacactctttttgtagtgtctataagtgaacatttggcgtgctttcaggcgtaacgtgaaaaaggaaatatcttcccataaaaaccagacagaagcattctcagaaacttgttcatgatgtgtgccctctactgacagagttgaacctttctttgcaaagagcagctttgaaacactctttttgtagaatctgcaagaggatatttggatagcttggaggatttcgttggaaacgggtatgtcttcagataaactctagacagaaacattctcagaaacttctttgggatgttgcattcaagtcacagagtagaacattcccatgcatagagcagatttgaaacactctttttgtagtatctggaagtggacatttggagcgctttcaggcctatgttgaaaaaggaaatatcttcccataaaaactagacgggaagcattctcagaaacttacttgtgatgtgtttgctcaactaacaggattgaaccatcgttttgaaggagcagttttgaaacacagttttcgtggaatctgcaagtggatatttggctagctttgaggatttcgttggaaacgggattacatataaaaaggagacagcagcattctcagaaacttctttgtgatgtttgcattcaagtcacagagttgaacattccctttcatagagcaggtttgaaacactctttttgtagtatctggatgtggacatttggatcgctttcaggcctatggtgaaaaaggaaatatcttcccatgaaaactagacagaagcattctcagaaacttatttgcgatgtgtgccctcaactgacagtgttgaacctttgttttgatagagcagttctgaaacacactttttgtaaaatctgcaagaggatatttggatagctttgaggatttcgttggaaacgggaatgtcttcatgtaaactctggacagaagcattctcagaaactgctttgggatgtttcaattgaagtcccagtgttgaacattcccattcatagagcaggtttgaaacactctttttgtactatctggaagtggacatttggagcgctttcaggtctacggtgaaaaaggagatatcttccaataaaaactagatagaagcaatgtcagaacttttttcatgatgtatctactcagcacacagagttgaacctttcttttgagagagcagttttgaaacactctttttgtggaatatgcaagtgggtattaggccagcttggaggatttcgttggaaacgggaatacgtataaaaagcagacagcagcattgtcagaaactactttgtgatgtttgcattcaagtcacagaattgaacactccctttcacagagcaggtttgaaacactctttttgtagtgtctgtaagtgaacatatggattgctttcaggcctaaggtgaaaaaggaaatatcttcccataaaaactagacagaagcattctcagaaacttgtttgtgatgtgtgccctctactgacagagttgaacctttctttgcaaagagcagttttgaaacactctttttgtagaatctgcaagaggatatttggatagctttgaagatttcttgggaaacgggaatgtcttcagataaactctagacagaagcattctcagaaacttctttgggatgtttcaattgaagtcacagtgttgaacattccctttcacagagcaggtttgaaacactctttttgtagtgtgtataagtgaacatttcgcgtgcgttcaggcctaacgtgaaaaaggaaatatcttcccataaaaactagacagaagcattctcagaaacttgttcatgatgtgtgccctctactgacagagttgaacctttctttgcaaagagcagctttgaaacattctttttgtagaatctgcaagaggatatttggatagctttgaggatttcgttggaaacgggtatgtcttcagataaactctagacagaagcattctcagaaacttctttgggatgttgcattcaagtcacagagtagaacattcccattcatagagcagatttgaaacactctttttgtagtatctggaagtggacatttggagcgctttcaggcctatgttgaaaaaggaaatatcttcccataaaaactagacggaagcattctcagaaacttacttgtgatgtgtttgctcaactaacagaattgaaccatcgttttaaaggagcagttttgaaacactgttttcgtggaatctgcaagtggatatttggctagctttgaggatttcgttggaaacgggattacatataaaaaggagacagcagcattctcagaaacttctttgtgatgtctgcattcaattcacagagttgagcattccctttcatagagcaggttggaaacactctttttgtagtatctggatgaggacatttggagcgctttcaggcgtatggtgaaaaaggaaatatcttcccgtaaaaactagacagaagcattctcagaaatttatttgtgatgtgtgccctcaactaacagagttgaacctttcttttgatagagcagttttgaaacactctttttgtaaaatctgcaagaggatatttggatagctttgaggatttcgttgcaaacgggaatggcttcatataaactctagacagaagcattctcagaaacttcgttgggatgtttcgattgaagtcccagtgttgaacattcccttttatagagcaggttggaaacactctttctgcattccctggaagtggacatttggagcgctttcaggacgacggtgaaaatggaaatatcttccaagaaaatctagatagaagcaatgtcagaaacttttatgtgatggatctactcagctaacagagttgaacctttcttttgagagagcagttttgcaacactctttttgtggaatatgcaagtggatattagggcagctttgaggatttcgttggaaacgggaatacatgtaaaaagcagacagcagcattctcagaaacttctttgtgatgtttgcattgaagtcacagagttgaacattccctttgagagagcaggtttgaaacacgccttttgtcatatctggaagtgtccattcggagcacattcaggcttgtgttgaaaaaggaaatatcctcccataaaaactagacagaagcattctcagaaacttatctgtgatgtatgtactcaactaacagaactaaaccatcgttttgaaggagcagtttcgaaacactctttttgcggaatctgcaagtggatatttggctagctgggaggatttcgttggaaacgggattacatacaaaaagcagacagcagcattctcagaaacttctttgtgatgtttgcattcaagtcacagagttgaacattccctttcatagagcaggtttgaaacactctttttgtagtatctggatgtggacatttggatcgctttcaggcctatggtgaaaaaggaaatatcttcccatgaaaactagacagaagcattctcagaaacttatttgtgatgtgtgccctcaactgacagtgttgaacctttgttttgatagagcagttctgaaacacactttttgtaaaatctgcaagaggatatttggatagctttgaggatttcgttggaaacgggaatgtcttcatgtaaactctagacagaagcattctcagaaactgctttgggatgtttcaattgaagtcccagtgttgaacattccctttcatagagcaggtttgaaacactctttttgtactatctggaagtggacatttggagcgctttcaggtctacggtgaaaaaggagatatcttccaataaaaactagatagaagcaatgtcagaacttttttcatgatgtatctactcagcaaacagggttgaacctttcttttgagagagcagttttgaaacactctttttgtggaatatgcaagtgggtatgaggccagcttggaggatttcgttggaaacgggaatacgtataaaaagcagacagcagcattgtcagaaactactttgtgatgtttgcattcaagtcacagaattgaacactccctttcacagagcaggtttgaaacactctttttgtagtgtctgtaagtgaacatttggattgctttcaggcctaaggtgaaaaaggaaatatcttcccataaaaactagacagaagcattctcagaaacttgtttgtgatgtgtgccctctactgacagagttgaacctttctttgcaaagagcagttttgaaacactctttttgtagaatctgcaagaggatatttggatagctttgaggatttcttgggaaacgggaatgtcttcagataaactctagacagaagcattctcagaaacttctttgggatgtttcaattgaagtcacagttttgaacattccctttcacagagcaggtttgaaacactctctttgtagtgtctataagtgaacatttggcgtgctttcaggcctaacgtgaaaaaggaaatatcttcccataaaaactagacagaagcattctcagaaacttgttcgtgatgtgtgccctctacagacagagttgaacctttctttgcaaagagcagctttgaaacacactttttgtagaatctgcaagaggatatttggatagctttgaggatttcgttggaaacgggtatgtcttcagataaactctagacagaagcattctcagaaacttctttgggatgttgcattcaagtcacagagtagaacattcccattcatagagcagatttgaaacactctttttgtagtatctggaagtggacatttggagcgctttcaggcctatgttgaaaaaggaaatatcttcccataaaaactagacggaagcattctcagaaacttatttgtgatgtgtttgctcaactaacaggattgaaccatcgttttgaaggagcagttttgaaacactgttttcgtggaatctgcaagtggatatttggctagctttgaggatttcgttggaaacgggattacatataaaaaggagacagcagcattctcagaaacttctttgtgatgtctgcattcaattcacagagttgagcattccctttcatagagcaggttggaaacactctttttgtagtatctggatgaggacatttggagcgctttcaggcctatggtgaaaaaggaaatatcttcccgtaaaaactagacagaagcattctcagaagtttatttctgatgtgtgccctcaactaacagagttgaacctttcttttgatagagcagttttgaaacactctttttgtaaaatctgcaagaggatatttggatagctttgaggatttcgttgcaaacgggaatggcttcatataaactctagacagaagcattctcagaaacttcgttgggatgtttcgattgaagtcccagtgttgaacattcccttttatagagcaggttggaaacactctttctgcattccctggaagtggacatttggagcgctttcaggacgacggtgaaaatggaaatatcttccaagaaaatctagatagaagcaatgtcagaaacttttatgtgatggatctactcagctaacagagttgaacctttcttttgagagagcagttttgcaacactctttttgtggaatatgcaagtggatattagggcagctttgaggatttcgttggaaacgggaatacatgtaaaaagcagacagcagcattctcagaaacttctttgtgatgtttgcattgaagtcacagagttgaacattccctttgagagagcaggtttgaaacacgccttttgtcatatctggaagtgtccattcggagcgcattcaggcttgtgttgaaaaaggaaatatcctcccataaaaactagacagaagcattctcagaaacttatctgtgatgtatgtactcaactaacagaactaaaccatcgttttgaaggagcagttttgaaacactctttttgcggaatctgcaagtggatatttggctagctgggaggatttcgttggaaacgggattacatacaaaaagcagacagcagcattctcagaaacttctttgtgatgtttgcattcaagtcacagagttgaacattccctttcatagagcaggtttgaaacactctttttgtagtatctggatgtggacatttggatcgctttcaggcctatggtgaaaaaggaaatatcttcccatgaaaactagacagaagcattctcagaaacttatttgtgatgtgtgccctcaactgacagtgttgaacctttgttttgatagagcagttctgaaacacactttttgtaaaatctgcaagaggatatttggatagctttgaggatttcgttggaaacgggaatgtcttcatgtaaactctagacagaagcattctcagaaactgctttgggatgtttcaattgaagtcccagtgttgaacattccctttcataggagcaggtttgaaacactctttttgtactatctggaagtggacatttggagcgctttcaggtctacggtgaaaaaggagatatcttccaataaaaactagatagaagcaatgtcagaacttttttcatgatgtatctactcagcaaacagagttgaacctttcttttgagagagcagttttgaaacactctttttgtggaatatgcaagtgggtattaggccagcttggaggatttcgttggaaacgggaatacgtataaaaagcagacagcagcattgtcagaaactactttgtgatgtttgcattcaagtcacagaattgaacactccctttcacagagcaggtttgaaacactctttttgtagtgtctgtaagtgaacatttggattgctttcaggcctaaggtgaaaaaggaaatatcttcccataaaaattagacagaagcattctcagaaacttgtttgtgatgtgtgccctctactgacagagttgaacctttctttgcaaagagcagttttgaaacactctttttgtagaatctgcaagaggatatttggatagctttgaggatttcttgggaaacgggaatgtcttcagataaactctagacagaagcattctcagaaacttctttgggatgtttcaattgaagtcacagtgttgaacattccctttcgcagagcaggtttgaaacactctttttgtagtgtctataagtgaacatttggcgtgctttcaggcctaacgtgaaaaaggaaatatcttcccataaaaactagacagaagcattctcagaaacttgttcttgatgtgtcccctctactgacagagttgaacctttctttgcaaagagcagctttgaaacactctttttgtagaatctgcaagaggatatttggatagcttggaggatttcgttggaaacgggtatgtcttcagataaactctagacagaagcattctcagaaacttctttgggatgttgcatgcaagtcacagagtagaacattcccattcatagagcagatttgaaacactctttttgtagtatttggaagtggacatttggagcgctttcaggcctatgttgaaaaaggaaatatcttcccataaaaactagacggaagcattctcagaaacttatttgtgatgtgtttgctcaactaacaggattgaaccatcgttttgaaggagcagttttgaaacactgttttcgtggaatctgcaagtggatatttggctagctttgaggatttcgttggaaacgggattacatataaaaaggagacagcagcattctcagaaacttctttgtgatgtctgcattcaattcacagagttgagcattccttttcatagagcaggttggaaacactctttttgtagtatctggatgaggacttttggagcgctttcaggcgtatggtgaaaaaggaaatatcttcccgtaaaaactagacagaagcattctcagaaatttatttgtgatgtgtgccctcaactaacagagttgaacctttcttttgatagagcagttttgaaacactctttttgtaaaatctgcaagaggatatttggatagctttgaggatttcgttgcaaacgggaatggcttcatataaactctagacagaaagcattctcagaaacttcgtcgggatgtttcgattgaagtcccagtgttgaacattcccttttatagagcaggttggaaacactctttctgcattccctggaagtggacaattggagcgctttcaggacgacggtgaaaatggaaatatcttccaataaaatctggatagagcaacgtcagaaacttttctgtgatggatctactcagctaacagagttgaacctttcttttgagagagcagttttgcaacactctttttgtggaatatgcaagtggatattagggcagctttgaggatttcgttggaaacgggaatacatgtaaaaagcagacagcagcattctcagaaacttctttgtgatgtttgcattgaagtcacagagttgaacattccctttgagagagcaggtttgaaacacgccttttgtcatatctggaagtgtccattcggagcgcattcaggcttgtgttgaaaaaggaaatatcctcccataaaaactagacagaagcattctcagaaacttatctgtgatgtatgtactcaactaacagaactaaaccatcgttttgaaggagcagttttgaaacactctttttgcggaatctgcaagtggatatttggctagctgggaggatttcgttggaaacgggattacatacaaaaagcagacagcagcattctcagaaacttctttgtgatgtttgcattcaagtcacagagttgaacattccctttcatagagcaggtttgaaacactctttttgtagtatctggatgtggacatttggatcgctttcaggcctatggtgaaaaaggaaatatcttcccatgaaaactagacagaagcattctcagaaacttatttgtgatgtgtgccctcaactgacagtgttgaacctttgttttgatagagcagttctgaaacacactttttgtaaaatctgcaagaggatatttggatagctttgaggatttcgttggaaacgggaatgtcttcatgtaaactctacacagaagcattctcagaaactgctttgggacgtttcaattgaagtcccagtgttgaacattcccattcatagagcaggtttgaaacactctttttgtactatctggaagtggacatttggagcgctttcaggtctacggtgaaaaaggagatatcttccaataaaaactagatagaagcaatgtcagaacttttttcatgatgtatctactcagcaaacagagttgaacctttcttttgagggagcagttttgaaacactatttttgtggaatatgcaagtgggtattaggccagcttggaggatttcgttggaaacgggaatacgtataaaaagcagacagcagcattgtcagaaactactttgtgatgtttgcatgcaagtcacagaatggaacactgcctttcacagagcaggtttgaaacactctttttgtagtgtctgtaagtgaacatttggattgctttcaggcctaaggtgaaaaaggaaatatcttcccataaaaactagacagaagcattctcagaaacttgtttgtgatgtgtgccctctactgacagagttgaacctttctttgcaaagagcagctttgaaacactctttttgtagaatctgcaagaggatatttggatagctttgaggatttcttgggaaacgggaatgtcttcagataaactctagacagaagcattctcagaaacttctttgggatgttgcattcaagtcacagagtagaacattcccattcatagagcagatttgaaacactctttttgtagtatctggaagtggacatttggagcgctttcaggcctatgttgaaaaaggaaatatcttcccataaaaactagacggaagcattctcagaaacttatttgtgatgtgtttgctcaactaacaggattgaaccatcgttttgaaggagcagttttgaaacactgttttcgtggaatctgcaagtggatatttggctagctttgaggatttcgttggaaacgggattacatataaaaaggagacagcagcattctcagaaacttctttgtgatgtttgcattcaattcacagagttgagcattccctttcatagagcaggttggaaacactctttttgtagtatctggatgtggacatttggatcgctttcaggcctatggtgaaaaaggaaatatcttcccatgaaaactagacagaagcattctcagaaacttatttgtgatgtgtgccctcaactgacagtgttgaacctttgttttgatagagcagttctgaaacacactttttgtaaaatctgcaagaggatatttggatagcttggaggatttcgttggaaacgggaatgtcttcatgtaaattctacacagaagcattctcagaaactgctttgggatgtttcaattgaagtcccagtgttgaacattcccattcatagagcaggtttgaaacactctttttgtactatctggaagtggacatttggagcgctttcaggtctacggtgaaaaaggagatatgttccaataaaaactagatagaagcaatgtcagaacatttttcatgatgtatctactcagcaaacagagttgaacctttcttttgagagagcagttttgacacagtctttgtggaatatgcaagtgggtattaggccagcttggaggatttcgttggaaacgggaatacgtataaaaagcagacagcagcattgtcagaaactactttgtgatgtttgcattcaagtcacagaattgaacactccctttcacagagcaggtttgaaacactctttttgtagtgtctgtaagtgaacatttggattgctttcaggcctatggtgaaaaaggaaatatcttcccataaaaactagacagaagcattctcagaaacttgtttgtgatatgtgccctctactgacagagttgaacctttctttgcaaagagcagttttgaaacactctttttgtagaatctgcaagaggatatttggatagctttgaggatttcttgggaaacgggaatgtcttcagataaactctagacagaagcattctcagaaacttctttgggatgtttcaattgaagtcacagtgttgaacattccctttcacagagcaggtttgaaacactctttttgtagtgtctataagtgaacatttggcgtgctttcaggcctaacgtgaaaaaggaaatatcttcccataaaaactagacagaagcattctcagaaacttgtttgtgatgtgtgccctctactgacagagttgaacctttctttgcaaagagcagctttgaaacactctttttgtagaatctgcaagaggatatgtggatagctttgaggatttcgttggaaacgggtatgtcttcagataaactctagacagaagcattctcagaaacttctttgggatgttgcattcaagtcacagagtagaacattcccattcatagagcagatttgaaacactctttttgtagtatctggaagtggacatttggagcgctttcaggcctatgttgaaaaaggaaatatcttcccataaaaactagacggaagcattctcagaaacttatttgtgatgtgtttgctcaactaacaggattgaaccatcgttttgaaggagcagttttgaaacactgttttcgtggaatctgcaagtggatatttggctagctttgaggatttcgttggaaacgggattacatatacaaaggagacagcagcattctcagaaacttctttgtgatgtctgcattcaattcacagagttgagcattccctttcatagagcaggttggaaacactctttttgtagtatctggatgaggacatttggagcgcttcaggcgtatggtgaaaaaggaaatatcttcccgtaaaaactagacagaagcattctcagaattttatttgtgatgtatgccctcaactaacagagttgaacctttcttttgatagagcagttttgaaacactctttttgtaaaatctgcaagaggatatttggatagctttgaggatttcgttgcaaacgggaatggcttcatataaactctagacagaagcattctcagaaacttcgttgggatgtttcgattgaagtcccagtgttgaacattcccttttatagagcaggttggaaacactctttctgcattccctggaagtggacatttggagcgctttcaggacgacggtgaaaatggaaatatcttccaagaaaatctagatagaagcaacgtcagaaacttttctgtgatggatctactcagctaacagagttgaacctttcttttgagagagcagttttgcaacactctttttgtggaatatgcaagtggatattagggcagccttgaggatttcgttggaaacgggaatacatgtaaaaagcagacagcagcattctcagaaacttctttgtgatgtttgcattgaagtcacagagttgaacattccctttgagagagcaggtttgaaacacgccttttgtcatatctggaagtgtccattcggagcgcattcaggcttgtgttgaaaaaggaaatatcctcccataaaaactagacagaagcattctcagaaacttatctgtgatgtatgtactcaactaacagaactaaaccatcgttttgaaggagcagttttgaaacactctttttgcggaatctgcaagtggatatttggctagctgggaggatttcgttggaaacgggattacatacaaaaagcagacagcagcattctcagaaacttctttgtgatgtttccattcaagtcacagagttgaacattccctttcatagagcaggtttgaaacactctttttgtagtatctggatgtggacatttggatcggctttcaggcctatggtgaaaaaggaaatatcttcccatgaaaactagacagaaggattctcagaaatttatttgtgatgtgtgccctcaactaacagagttgaacctttcttttgatagagcagttttgaaacactctttttgtaaaatctgcaagaggatatttggatagcttggaggatttcattgcaaacgggaatggcttcatataaactctagacagaagcattctcagaaacttcgttgggatgtttcgattgaagtcccagtgttcaacattcccttttatagagcaggttggaaacactctttctgcattccctggaagtggacatttggagcgctttcaggacgacggtgaaaatggaaatatcttccaagaaaatctagatagaaagcaacgtcagaaacttttatgtgatggatctactcagctaacagagttgaacctttcttttgagagagcagttttgcaacactctttttgtggaatatgcaagtggatattagggcagctttgaggatttcgttggaaacgggaatacatgtaaaaagcagacagcagcattctcagaaacttctttgtgatgtttgcattgaagtcacagagttgaacattccctttgagagagcaggtttgaaacacgccttttgtcatatctggaagtgtccattcggagcgcattcaggcttgtgttgaaaaaggaaatatcctcccataaaaactagacagaagcattctcagaaacttatctgtgatgtatgtactcaactaacagaactaaaccatcgttttgaaggagcagttttgaaacactctttttgcggaatctgcaagtggatatttggctagctgggaggatttcgttggaaacgggattacatacaaaaagcagacagcagcattctcagaaacttctttgtgatgtttgcattcaagtcacagagttgaacattccctttcatagagcaggtttgaaacactctttttgtagtatctggatgtggacatttggatcgctttcaggcctatggtgaaaaaggaaatatcttcccatgaaaactagacagaagcattctcagaaacttatttgtgatgtgtgccctcaactgacagtgttgaacctttgttttgatagagcagttctgaaacacactttttgtaaaatctgcaagaggatatttggatagatttgaggatttcgttggaaacgggaatgtcttcatgtaaactctagacagaagcattctcagaaactgctttgggatgtttcaattgaagtcccagtgttgaacattcccattcatagagcaggtttgaaacactctttttgtactatctggaagtggacatttggagcgctttcaggtcctacggtgaaaaaggagatatcttccaataaaaactagatagaagcaatgtcagaacttttttcatgatgtatctactcagcaaacagagttgaacctttcttttgagggagcagttttgaaacactatttttgtggaatatgcaagtgggtattaggccagcttggaggatttcgttggaaacgggaatacgtataaaaagcagacagcagcattgtcagaaactactttgtgatgtttgcattcaagtcacagaattgaacactccctttcacagagcaggtttgaaacactctttttgtagtgtctgtaagtgaacatatggattgctttcaggcctaaggtgaaaaaggaaatatcttcccataaaaactagacagaagcattctcagaaacttgtttgtgatgtgtgccctctactgacagagttgaacctttctttgcaaagagcagttttgaaacactctttttgtagaatctgcaagaggatatttggatagctttgaggatttcttgggaaacgggaatgtcttcagataaactctagacagaagcattctcagaaacttctttgggatatttcaattgaagtcacagtgttgaacattccctttcacagagcaggtttgaaacactctttttgtagtgtctataagtgaacatttggcgtgctttcaggcctaacgtgaaaaaggaaatatcttcccataaaaactagacagaagcattctcagaaacttgttcgtgatgtgtgccctctactgacagagttgaacctttctttgcaaagagcagctttgaaacacactttttgtagaatctgcaagaggatatttggatagcttggaggatttcgttggaaacgggtatgtcttcagataaactctagacagaagcattctcagaaacttctttgggatgttgcattcaagtcacagagtagaacattcccattcatagagcagatttgaaacactctttttgtagtatctggaagtggacatttggagcgctttcaggcctatgttgaaaaaggaaatatcttcccataaaaactagacggaagcattctcagaaacttatttgtgatgtgtttgctcaactaacaggattgaaccatcgttttgaaggagcagttttgaaacactgttttcgtggaatctgcaagtggatatttggctagctttgaggatttcgttggaaacgggattacatataaaaaggagacagcagcattctcagaaacttctttgtgatgtctgcattcaattcacagagttgagcattccctttcatagagcaggttggaaacactctttttgtagtatctggatgaggacatttggagtgctttcaggcgtatggtgaaaaaggaaatatcttcccgtaaaaactagacagaagcattctcagaagtttatttgtgatgtgtgccctcaactaacagagttgaacctttcttttgatagagcagttttgaaacactctttttgtaaaatctgcaagaggatatttggatagctttgaggatttcgttgcaaacgggaatggcttcatataaactctagacagaagcattctcagaaacttcgttgggatgtttcgattgaagtcccagtgttgaacattcccttttatagagcaggttggaaacactctttctgcattccctggaagtggacatttggagcgctttcaggacgacggtgaaaatggaaatatcttccaagaaaatctagatagaagcaacgtcagaaacttttctgtgatggatctactcagctaacagagttgaacctttcctttgagagagcagttttgcaacactctttttgtggaatatgcaagtggatattagggcagctttgaggatttcgttggaaacgggaatacatgtaaaaagcagacagccagcattctcagaaacttctttgtgatgtttgcattgaagtcacagagttgaacattccctttgagagagcaggtttgaaacacgccttttgtcatatctggaagtgtccattcggagcgcattcaggcttgtgttgaaaaaggaaatatcctcccagaaaaactagacagaagcattctcagaaacttatctgtgatgtatgtactcaactaacagaactaaaccatcgttttgaaggagcagttttgaaacactctttttgcggaatctgcaagtggatatttggctagctgggaggatttccgttggaaacgggattacatacaaaaagcagacagcagcattctcagaaacttatttgtgatgtgtgccctcaactgacagtgttgaacctttgttttgatagagcagttctgaaacacactttttgtaaaatctgcaagaggatatttggatagctttgaggatttcgttggaaacgggaatgtcttcatgtaaactctggacagaagcattctcagaaactgctttgggatgtttcaattgaagtcccagtgttgaacattccctttcatagagcaggtttgaaacactctttttgtactatctggaagtggacatttggagcgctttcaggtctacggtgaaaaaggagatatcttccaataaaaactagatagaagcaatgtcagaacttttttcatgatgtatctactcagcaaacagagttgaacctttcttttgagagagcagttttgaaacactctttttgtggaatatgcaagtgggtattaggccagcttggaggatttcgttggaaacgggaatacgtataaaaagcagacagcagcattgtcagaaactactttgtgatgtttgcattcaagtcacagaattgaacactccctttcacagagcaggtttgaaacactctttttgtagtgtctgtaagtgaacatttggattgctttcaggcctaaggtgaaaaaggaaatatcttcccataaaaactagacagaagcattctcagaaacttgtttgtgatgtgtgccctctactgacagagttgaacctttctttgcaaagagcagttttgaaacactctttttgtagaatctgcaagaggatatttggatagctttgaggatttcttgggaaacgggaatgtcttcagataaactctagacagaagcattctcagaaacttctttgggatgtttcaattgaagtcacagtgttgaacattccctttcacagagcaggtttgaaacactctttttgtagtgtctataagtgaacatttggcgtgctttcaggcgtaacgtgaaaaaggaaatatcttcccataaaaaccagacagaagcattctcagaaacttgttcttgatgtgtcccctctactgacagagttgaacctttctttgcaaagagcagctttgaaacactctttttgtagaatctgcaagaggatatttggatagcttggaggatttcgttggaaacgggtatgtcttcagataaactctagacagaagcattctcagaaacttctttgggatgttgcattcaagtcacagagtagaacattcccattcatagagcagatttgaaacactctttttgtagtatctggaagtggacatttggagcgctttcaggcctatgttgaaaaaggaaatatcttcccataaaaactagacggaagcattctcagaaacttatttgtgatgtgtttgctcaactaacaggattgaaccatcgttttgaaggagcagttttgaaacactgttttcgtggaatctgcaagtggatatttggctagctttgaggatttcgttggaaacgggattacatataaaaaggagacagcagcattctcagaaacttctttgtgatgtctgcattcaagtcacagagttgagcattccctttcatagagcaggttggaaacactctttttgtagtatctggatgaggacatttggagcgctttcaggcgtatggtgaaaaaggaaatatcttcccgtaaaaactagacagaagcattctcagaagtttatttgtgatgtgtgccctcaactaacagagttgaacctttcttttgatagagcagttttgaaacactctttttgtaaaatctgcaagaggatatttggatagctttgaggatttcgttgcaaacgggaatggcttcatataaactctagacagaagcattctcagaaacttcgttgggatgtttcgattgaagtcccagtgttgaacattcccttttatagagcaggttggaaacactctttctgcattccctggaagtggacatttggagcgctttcaggacgacggtgaaaatgaaaatatcttccaagaaaatctagatagaagcaacgtcagaaacttttctgtgatggatctactcagctaacagagttgaacctttcttttgagagagcagttttgcaacactctttttgtggaatatgcaagtggatattagggcagctttgaggatttcgttggaaacgggaatacatgtaaaaagcagacagcagcattctcagaaacttctttgtgatgtttgcattgaagtcacagagttgaacattccctttgagagagcaggtttgaaacacgccttttgtcatatctggaagtgtccattcggagcgcattcaggcttgtgttgaaaaaggaaatatcctcccagaaaaactagacagaagcattctcagaaacttatctgtgatgtatgtactcaactaacagaactaaaccatcgttttgaaggagcagttttgaaacactctttttgcggaatctgcaagtggatatttggctagctgggaggatttcgttggaaactggattacatacaaaaagcagacagcagcattctcagaaacttctttgtgatgtttgcattcaagtcacagagttgaacattccctttcatagagcaggtttgaaacactctttttgtagtatctggatgtggacatttggatcgctttcaggcctatggtgaaaaaggaaatatcttcccatgaaaactagacagaagcattctcagaaacttatttgtgatgtgtgccctcaactgacagtgttgaacctttgttttgatagagcagttctgaaacacactttttgtaaaatctgcaagaggatatttggatagctttgaggatttcgttgaaacgggaatgtcttcatgtaaactctagacagaagcattctcagaaactgctttgggatgtttcaattgaagtcccagtgttgaacattccctttcatagagcaggtttgaaacactctttttgtactatctggaagtggacatttggagcgctttcaggtctacggtgaaaaaggagatatcttccaataaaaactagatagaagcaatgtcagaacttttttcatgatgtatctactcagcaaacagagttgaacctttcttttgagagagcagttttgaaacactctttttgtggaatatgcaagtggttattaggccagcttggaggatttcgttggaaacgggaatacgtataaaaagcagacagcagcattgtcagaaactactttgtgatgtttacattcaagtcacagaactgaacactccctttcacagagcaggtttgaaacactctttttgtagtgtctgtaagtgaacatttggattgctttcaggcctaaggtgaaaaaggaaatgtcttcccataaaaactagacagaagcattctcagaaacttgtttgtgatgtgtgccctctactgacagagttgaacctttctttgcaaagagcagttttgaaacactctttttgtagaatctgcaagaggatatttggatagctttgaggatttcttgggaaacgggaatgtcttcagataaactctagacagaagcattctcagaaacttctttgggatgtttcaattgaagtcacagtgttgaacattccctttcacagagcaggtttgaaacactctttttgtagtgtctataagtgaacatttggcgtgctttcaggcgtaacgtgaaaaaggaaatatcttcccataaaaactagacagaagcattctcagaaacttgttcgtgatgtgtgccctctactgacagagttgaacctttctttgcaaagagcagctttgaaacactctttttgtagaatctgcaagaggatatttggatagcttggaggatttcgttggaaacgggtatgtcttcagataaactctagacagaagcattctcagaaacttctttgggatgttgcattcaagtcacagagtagaacattcccattcatagagcagatttgaaacactctttttgtagtatctggaagtggacatttggagcgctttcaggcctatgttgaaaaaggaaatatcttcccataaaaactagacggaagcattctcagaaacttacgtgtgatgtgtttgctcaactaacagaattgaaccatcgttttgaaggagcagttttgaaacactgttttcgtggaatctgcaagtggatatttggctagctttgaggatttcgttggaaacgggattacatataaaaaggagtcagcagcattctcagcaaacttctttgtgatgtctgcattcaagtcacagagttgagcattccctttcatagagcaggttggaaacactctttttgtagtatctggatgaggacatttggagcgctttcaggcgtatggtgaaaaaggaaatatcttcccgtaaaaactagacagaagcattctcagaaatttatttgtgatgtgtgccctcaactaacagagttgaacctttcttttgatagagcagttttgaaacactctttttgtaaaatctgcaagaggatatttggatagctttgaggatttcgttgcaaacgggaatggcttcatataaactctagacagaagcattctcagaaacttcgttgggatgtttcgattgaagtcccagtgttgaacattcccttttatagagcaggttggaaacactctttctgcattccctggaagtggacatttggagcgctttcaggacgacggtgaaaatggaaatatcttccaagaaaatctagatagaagcaacgtcagaaacttttctgtgatggatctactcagctaacagagttgaacctttcttttgagagagcagttttgcaacactctttttgtggaatatgcaagtggatattagggcagctttgaggatttcgttggaaacgggaatacatgtaaaaagcagacagcagcattctcagaaacttctttgtgatgtttgcattgaagtcacagagttgaacattccctttgagagagcaggtttgaaacacgccttttgtcatatctggaagtgtccattcggagcgcattcaggcttgtgttgaaaaaggaaatatcctcccataaaaactagacagaagcattctcagaaacttatctgtgatgtatgtactcaactaacagaactaaaccatcgttttgaaggagcagttttgaaacactctttttgcggaatctgcaagtggatatttggctagctgggaggatttcgttggaaacgggattacatagaaaaagcagacagcagcattctcagaaacttctttgtgatgtttgcattcaagtcacagagttgaacattccctttcatagagcaggtttgaaacactctttttgtagtatctggatgtggacatttggatgctttcaggcctatggtgaaaaaggaaatatcttcccatgaaaactagacagaagcattctcagaaacttatttgtgatgtgtgccctcaactgacagtgttgaacctttgttttgatagagcagttctgaaacacactttttgtaaaatctgcaagaggatatttggatagctttgaggatttcgttggaaacgggaatgtcttcatgtaaactctagacagaagcattctcagaaactgctttgggatgtttcaattgaagtcccagtgttgaacattccctttcatagagcaggtttgaaacactctttttgtagtatctggaagtggacatttggagcgctttcaggtctacggtgaaaaaggagatatcttccaataaaaactagatagaagcaatgtcagaacttttttcatgatgtatctactcagcaaacagagttgaacctttcttttgagagagcagttttgaaacactctttttgtggaatatgcaagtgggtattaggccagcttggaggatttcgttggaaacgggaatacgtataaaaagcagacagcagcattgtcagaaactactttgtgatgtttgcattcaagtcacagaattgaacactccctttcacagagcaggtttgaaacactctttttgtagtgtctgtaagtgaacatttggattgctttcaggcctaaggtgaaaaaggaaatatcttcccataaaaactagacagaagcattctcagaaacttgtttgtgatgtgtgccctctactgacagagttgaacctttctttgcaaagagcagttttgaaacactctttttgtagaatctgcaagaggatatttggatagctttgaggatttcttgggaaacgggaatgtcttcagataaactctagacagaagcattctcagaaacttctttgggatgtttcaattgaagtcacagtgttgaacattccctttcacagagcaggtttgaaacactctttttgtagtgtctataagtgaacatttggcgtgctttcaggcctaacgtgaaaaaggaaatatcttcccataaaaactagacagaagcattctcagaaacttgttcatgatgtgtgccctctactgacagagttgaacctttctttgcaaagagcagctttgaaacactctttttgtagaatctgcaagaggatatttggatagctttgaggatttcgttggaaacgggtatgtcttcagataaactctagacagaagcattctcagaaacttctttgggatgttgcattcaagtcacagagtagaacattcccattcatagagcagatttgaaacactctttttgtagtatctggaagtggacatttggagcgctttcaggcctatgttgaaaaaggaaatatcttcccataaaaagtagacggaaagcattctcagaaacttaattgtgatgtgtttgctcaactaacaggattgaaccatcgttttgaaggagcagttttgaaacactgttttcgtggaatctgcaagtggatatttggctagctttgaggatttcgttggaaacgggattacatataaaaaggagacagcagcattctcagaaacttctttgtgatgtctgcattcaattcacagagttgagcattccctttcatagagcaggttggaaacactctttttgtagtatctggatgaggacatttggagcgctttccggcgtatggtgaaaaaggaaatatcttcccgtaaaaactagacagaagcattctcagaagtttatttgtgatgtgtgccctcaactaacagagttgaacctttcttttgatagagcagttttgaaacactctttttgtaaaatctgcaagaggatatttggatagctttgaggatttcgttgcaaacgggaatggcttcatataaactctagacagaagcattctcagaaacttcgttgggatgtttcgattgaagtcccagtgttgaacattcccttttatagagcaggttggaaacactctttctgcattccctggaagtggacatttggagcgctttcaggacgacggtgaaaatggaaatatcttccaagaaaatctagatagaagcaatgtcagaaacttttatgtgatggatctactcagctaacagagttgaacctttcttttgagagagcagttttgcaacactctttttgtggaatatgcaagtggatattagggcagctttgaggatttcgttggaaacgggaatacatgtaaaaagcagacagcagcattctcagaaacttctttgtgatgtttgcattgaagtcacagagttgaacattccctttgagagagcaggtttgaaacacgccttttgtcatatctggaagtgtccattcggagcgcattcaggcttgtgttgaaaaaggaaatatcctcccataaaaactagacagaagcattctcagaaacttatctgtgatgtatgtactcaactaacagaactaaaccatcgttttgaaggagcagttttgaaacactctttttgcggaatctgcaagtggatatttggctagctgggaggatttcgttggaaacgggattacatacaaaaagcagacagcagcattctcagaaacttctttgtgatgtttgcattcaagtcacagagttgaacattccctttcatagagcaggtttgaaacactctttttgtagtatctggatgtggacatttggatcgctttcaggcctatggtgaaaaaggaaatatcttcccatgaaaactagacagaagcattctcagaaacttatttgtgatgtgtgccctcaactgacagtgttgaacctttgttttgatagagcagttctgaaacacactttttgtaaaatctgcaagaggatatttggatagctttgaggatttcgttggaaacgggaatgtcttcatgtaaactctagacagaagcattctcagaaactgctttgggatgtttcaattgaagttccagtgttgaacattccctttcatagagcaggtttgaaacactctttttgtactatctggaagtggacatttggagcgctttcaggtctacggtgaaaaaggagatatcttccaataaaaactagatagaagcaatgtcagaacttttttcatgatgtatctactcagcaaacagagttgaacctttcttttgagagagcagtttcgaaacactctttctgtggaatatgcaagtgggtatttggccagcttggaggatttcgttggaaacgggaatacgtataaaaagcagacagcagcattgtcagaaactactttgtgatgtttgcattcaagtcacagaattgaacactccctttcacagagcaggtttgaaacactctttttgtagtgtctgtaagtgaacatttggattgctttcaggcctaaggtgaaaaaggaaatatcttcccataaaaactagacagaagcattctcagaaacttgtttgtgatgtgtgccctctactgacagagttgaacctttctttgcaaagagcagttttgaaacactctttttgtagaatctgcaagaggatatttggatagctttgaggatttcttgggaaacgggaatgtcttcagataaactctagacagaagcattctcagaaacttctttgggatgtttcaattgaagtcacagtgttgaacattccctttcacagagcaggtttgaaacactctttttgtagtgtctataagtgaacatttggcgtgctttcaggcctaacgtgaaaaaggaaatatcttcccataaaaactagacagaagcattctcagaaacttattcatgatgtgtgccctctactgacagagttgaacctttctttgcaaagagcagctttgaaacactctttttgtagaatctgcaagaggatatttggatagctttgaggatttcgttggaaacgggtatgtcttcagataaactctagacagaagcattctcagaaacttctttgggatgttgcattcaagtcacagagtagaacattcccattcatagagcagatttgaaacactctttttgtagtatctggaagtggacatttggagcgctttcaggcctatgttgaaaaaggaaatatcttcccataaaaactagacggaagcattctcagaaacttacttgtgatgtgtttgctcaactaacagaattgaaccatcgttttgaaggagtagttttgaaacactgttttcgtggaatctgcaagtggatatttggctagctttgaggatttcgttggaaacgggattacatataaaaaggagacagcagcattctcagaaacttctttgtgatgtctgcattcaagtcacagagttgagcattccctttcatagagaaggttggaaacactctttttgtagtatctggatgaggacatttggagcgctttcaggcgtatggtgaaaaaggaaatatcttcccgtaaaaactagacagaagcattctcagaaatttatttgtgatgtgtgccctcaactaacagagttgaacctttcttttgatagagcagttttgaaacactctttttgtaaaatctgcaagaggatatttggatagctttgaggatttcattgcaaacgggaatggcttcatataaactctagacagaagcattctcagaaacttcgttgggatgtttcgattgaagtcccagtgttgaacattcccttttatagagcaggttggaaacactctttctgcattccctggaagtggacatttggagcgctttcaggacgacggtgaaaatggaaatatcttccaagaaaatctagatagaagcaacgtcagaaacttttatgtgatggatctactcagctaacagagttgaacctttcttttgagagagcagttttgcaacacactttttgtggaatatgcaagtggatattagggcagctttgaggatttcgttggaaacgggaatacatgtaaaaagcagacagcagcattctcagaaacttctttgtgatgtttgcattgaagtcacagagttgaacattccctttgagagagcaggtttgaaacacgccttttgtcatatctggaagtgtccattcggagcgcattcaggcttgtgttgaaaaaggaaatatcctcccataaaaactagacagaagcattctcagaaacttatctgtgatgtatgtactcaactaacagaactaaaccatcgttttgaaggagcagttttgaaacactctttttgcggaatctgcaagtggatatttggctagctgggaggatttcgttggaaacgggattacatacaaaaagcagacagcagcattctcagaaacttctttgtgatgtttgcattcaagtcacagagttgaacattccctttcatagagcaggtttgaaacactctttttgtagtatctggatgtggacatttggatcgctttcaggcctatggtgaaaaaggaaatatcttcccatgaaaactagacagaagcattctcagaaacttatttgtgatgtgtgccctcaactgacagtgttgaacctttgttttgatagagcagttctgaaacacactttttgtaaaatctgcaagaggatatttggatagctttgaggatttcgttggaaacgggaatgtcttcatgtaaactctagacagaagcattctcagaaactgctttgggatgtttcaattgaagtcccagtgttgaacattcccattcatagagcaggtttgaaacactctttttgtactatctggaagtggacatttggagcgctttcaggtctacggtgaaaaaggagatatcttccaataaaaactagatagaagcaatgtcagaactttttacatgatgtatctactcagcaaacagagttgaacctttcttttgagagagcagttttgaaacactctttttgtggaatatgcaagtgggtattaggccagctaggaggatttcgttggaaacgggaatacgtataaaaagcagacagcagcattgtcagaaactactttgtgatgtttgcattcaagtcacagaattgaacactccctttcacagagcaggtttgaaacactctttttgtagtgtctgtaagtgaacatatggattgctttcaggcctaaggtgaaaaaggaaatatcttcccataaaaactagacagaagcattctcagaaacttgtttgtgatgtgtgccctctactgacagagttgaacctttctttgcaaagagcagttttgaaacactctttttgtagaatctgcaagaggatatttggatagctttgaggatttcttgggaaacgggaatgtcttcagataaactctagacagaagcattctcagaaacttctttgggatgtttcaattgaagtcacagtgttgaacattccctttcacagagcaggtttgaaacactctttttgtagtgtctataagtgaacatttggcgtgctttcaggcctaacgtgaaaaaggaaatatcttcccataaaaactagacagaagcattctcagaaacttgttcgtgatgtgtgccctctactgacagagttgaacctttctttgcaaagagcagctttgaaacactctttttgtagaatctgcaagaggatatttggatagcttggaggatttcgttggaaacgggtatgtcttcagataaactatagacagaagcattctcagaaacttctttgggatgttgcattcaagtcacagagtagaacattcccattcatagagcagatttgaaacactctttttgtagtatctggaagtggacatttggagcgctttcaggcctatgttgaaaaaggaaatatcttcccataaaaactagacggaagcattctcagaaacttatttgtgatgtgcttgctcaactaacaggattgaaccatcgttttgaaggagcagttttgaaacactgttttcatggaatctgcaagtggatatttggctagctttgaggatttcgttggaaacgggattacatataaaaaggagacagcagcattctcagaaacttctttgtgatgtctgcattcaattatcagagttgagcattccctttcatagagcaggttggaaacactctttttgtagtatctggatgaggacatttggagcgctttcaggcctatggtgaaaaaggaaatatcttcccgtaaaaactagacagaagcattctcagaagtttatttgtgatgtgtgccctcaaataacagagttgaacctttcttttgatagagcagttttgaaacactctttttgtaaaatctgcaagaggatatttggatagctttgaggatttcgttgcaaacgggaatggcttcatataaactctagacagaagcattctcagtaaactgctttgggatgtttcaattgaagtcccagtgttgaacattccctttcatagagcaggtttgaaacactctttttgtactatctggaagtggacatttggagcgctttcaggtctacggtgaaaaaaggagatatcttccaataaaaactagatagaagcaatgtcagaacttttttcatgatgtatctactcagcaaacagagttgaacctttcttttgagagagcagttttgaaacactctttttgtggaatatgcaagtgggtattaggccagcttggaggatttcgttggaaacgggaatacgtataaaaagcagacagcagcattgtcagaaactactttgtgatgtttgcattcaagtcacagaattgaacactccctttcacagagcaggtttgaaacactctttttgtagtgtctgtaagtgaacatttggattgctttcaggcctaaggtgaaaaaggaaatatcttcccataaaaactagacagaagcattctcagaatcttgtttgtgatgtgtgccctctactgacagagttgaacctttctttgcaaagaccagttttgaaacactctttttgtagaatctgcaagaggatatttggatagctttgaggatttcttgggaaacgggaatgtcttcagataaactctagacagaagcattctcagaaacttctttgggatgtttcaattgaagtcacagtgttgaacattccctttcacagagcaggtttgcaacactctttttgtagtgtctataagtgaacatttggcgtgctttcaggcctaacgtgaaaaaggaaatatgttcccataaaaactagacagaagcattctcagaaacttgttcgtgatgtgtgcccctctactgacagagttgaacctttctttgcaaagagcagctttgaaacacactttttgtagaatcagcaagaggatatttggatagctttgaggatttcgttggaaacgggtatgtcttcagataaactctagacagaagcattctcagaaacttctttgggatgttgcattcaagtcacagagtacaacattcccattcatagagcagatttgaaacactctttttgtagtatctggaagtggacatttggagcgctttcaggcctatgttgaaaaaggaaatatcttcccataaaaactagacggaagcattctcagaaacttatttgtgatgtgtttgctcaactaacaggattgaaccatcgttttgaaggagcagttttgaaacactgttttcgtggaatctgcaagtggatatttggctagctttgaggatttcgttggaaacgggattacatatacaaaggagacagcagcattctcagaaacttctttgtgatgtctgcattcaattcacagagttgagcattccctttcatagagcaggttggaaacactctttttgtagtatctggatgaggacatttggagcgctttcaggcgtatggtgaaaaaggaaatatcttcccgtaaaaactagacagaagcattctcagaagtttatttgtgatgtgtgccctcaactaacagagttgaacctttcttttgatagagcagttttgaaacactctttttgtaaaatctgcaagaggatatttggatagctttgaggatttcgttgcaaacgggaatggcttcatataaactctagacagaagcattctcagaaacttcgttgggatgtttcgattgaagtcccagtgttgaacattcccttttatagagcaggttggaaacactctttctgcattccctggaagtggacatttggagcgctttcaggacgacggtgaaaatggaaatatcttccaagaaaatctagatagaagcaatgtcagaaacttttatgtgatggatctactcagctaacagagttgaacctttcttttgagagagcagttttgcaacactctttttgtggaatatgcaagtggatattagggcagctttgaggatttcgttggaaacgggaatacatgtaaaaagcagacagcagcattctcagaaacttctttgtgatgtttgcattgaagtcacagagttgaacattccctttgagagagcaggtttgaaacacgccttttgtcatatctggaagtgtccattcggagcgcattcaggcttgtgttgaaaaaggaaatatcctcccataaaaactagacagaagcattctcagaaacttatctctgatgtatgtactcaactaacagaactaaaccatcgttttgaaggagcagttttgaaacactctttttgcggaatctgcaagtggatatttggctagctgggaggatttcgttggaaacgggattacatacaaaaagcagacagcagcattctcagaaacttatttgtgatgtgtgccctcaactgacagtgttgaacctttgttttgatagagcagttctgaaacacactttttgtaaaatctgcaagaggatatttggatagctttgaggatttcgttggaaacgggaatgtcttcatgtaaactctacacagaagcattctcagaaactgctttgggatgtttcaattgaagtcccagtgttgaacattcccattcatagagcaggtttgaaacactctttttgtactatctggaagtggacatttggagcgctttcaggtctacggtgaaaaaggagatatcttccaataaaaactagatagaagcaatgtcagaacttttttcatgatgtatctactcagcaaacagagttgaacctttcttttgagagagcagttttgaaacactctttttgtggaatatgcaagtgggtattaggccagcttggaggatttcgttggaaacgggaatacgtataaaaagcagacagcagcattgtcagaaactactttgtgatgtttgcattcaagtcacagaattgaacactccctttcacagagcaggtttgaaacactctttttgtagtgtctgtaagtgaacatttggattgctttcaggcctaaggtgaaaaaggaaatatcttcccataaaaactagacagaagcattctcagaaacttgtttgtgatgtgtgccctctactgacagagttgaacctttctttgcaaagagcagttttgaaacactctttttgtagaatctgcaagaggatatttggatagctttgaggatttcttgggaaacgggaatgtcttcagataaactctagacagaagcattctcagaaacttctttgggatgtttcaattgaagtcacagtgttgaacattccctttcacagagcaggtttgaaacactctttttgtagtgtctataagtgaacatttggcgtgctttcaggcctaacgtgaaaaaggaaatatcttcccataaaaactagacggaagcattctcagaaacttgttcgtgatgtgtgccctctactgacagagttgaacctttctttgcaaagagcagctttgaaacacactttttgtagaatctgcaagaggatatttggatagctttgaggatttcgttggaaacggttatgtcttcagataaactctagacagaagcattctcagaaacttctttgggatgttgcatgcaagtcacagagtagaacattcccattcatagagcagatttgaaacactctttttgtagtatctggaagtggacatttggagcgctttcaggcctatgttgaaaaaggaaatatcttcccataaaaactagacggaagcattctcagaaacttatttgtgatgtgtttgctcaactaacaggattgaaccatcgttttgaaggagcagttttgaaacactgttttcgtggaatctgcaagtggatatttggctagctttgaggatttcgttggaaacgggattacatataaaaaggagacagcagcattctgagaaacttctttgtgatgtctgcattcaattcacagagttgagcattccctttcatagagcaggttggaaacactctttttgtagtatctggatgtggacatttggatcgctttcaggcctatggtgaaaaaggaaatatcttcccatgaaaactagacagaagcattcttagaaacttatgtgtgatgtgtgccctcaactgacagtgttgaacctttgttttgatagagcagttctgaaacacacttttggtaaaatctgcatgaggaaatttggatagctttgagcatttcgttggaaacgggaatgtcttcatataaactctagacagaagcattctcagaaactgctttgggatgtttcaattgaagtcccagtgttgaacattccctttcatagagcaggtttgaaacactctttttgtagtatctggaagtggacatttggagcgctttcaggtctacggtgaaaaaggagatatcttccaataaaaactagatagaagcaatgtcagaacttttttcatgatgtatctactcagcaaacagagttgaacctttcttttgagagagcagttttgaaacactctttttgtgtaatatgcaagtgggtattaggccagcttggaggatttcgttggaaacgggaatacgtataaaaagcagacagccattgtcagaaactactttgtgatgtttgcattcaagtcacagaattgaacactccctttcacagagcaggtttgaaacactctttttgtagtgtctgtaagtgaacatttggattgctttcaggcctaaggtgaaaaaggaaatatcttcccataaaaactagacagaagcattctcagaaacttgtttgtgatgtgtgccctctactgacagagttgaacctttctttgcaaagagcagttttgaaacactctttttgtagaatctgcaagaggatatttggatagctttgaggatttcttgggaaacgggaatgtcttcagataaactctagacagaagcattctcagaaacttctttgggatgtttcaattgaagtcacagtgttgaacattccctttcacagagcaggtttgaaacactctttttgtagtgtctataagtgaacatttggcgtgctttcaggcctaacgtgaaaaaggaaatatcttcccataaaaactagacagaagcattctcagaaacttgttcgtgatgtgtgccctctactgacagagttgaacctttctttgcaaagagcagctttgaaacacactttttgtagaatctgcaagaggatatttggatagctttgaggatttcgttggaaacgggtatgtcttcagataaactctagacagaagcattctcagaaacttctttgggatgttgcattcaagtcacagagtagaacattcccattcatagagcagatttgaaacactctttttgtagtatctggaagtggacatttggagcgctttcaggcctatgttgaaaaaggaaatatcttcccataaaaactagacggaagcattctcagaaacttatttgtgatgtgtttgctcaactaacaggattgaaccatcgttttgaaggagcagttttgaaacactgttttcgtggaatctgtaagtggatatttggctagctttgaggatttcgttggaaacgggattacatataaaaaggagacagcagcattctcagaaacttctttgtgatgtctgcattcatttcacagagttgagcattccctttcatagagcaggttggaaacactctttttgtagtatctggatgaggacatttggagcgctttcaggcgtatggtgaaaaaggaaatatcttcccgtaaaaactagacagaagcattctcagaagtttatttgtgatgtgtgccctcaactaacagagttgaacctttcttttgatagagcagttttgaaacactctttttgtaaaatctgcaagaggatatttggatagctttgaggatttcgttgcaaacgggaatggcttcatataaactctagacagaagcattctcagaaacttcgttgggatgtttcgattgaagtcccagtgttgaacattcccttttatagagcaggttggaaacactctttctgcattccctggaagtggacatttggagcgctttcaggacgacggtgaaaatggaaatatcttccaagaaaatctagatagaagcaatgtcagaaacttttatgtgatggatctactcagctaacagagttgaacctttcttttgagagagcagttttgcaacactctttttgtggaatatgcaagtggatattagggcagctttgaggatttcgttggaaacgggaatacatgtaaaaagcagacagcagcattctcagaaacttctttgtgatgtttgcattgaagtcacagcagttgaacattccctttgagagagcaggtttgaaacacgccttttgtcatatctggaagtgtccattcggagcgcattcaggcttgtgttgaaaaaggaaatatcctcccataaaaactagacagaagcattctcagaaacttatctgtgatgtatgtactcaactaacagaactaaaccatcgttttgaaggagcagttttgaaacactctttttgcggaatctgcaagtggatatttggctagctgggaggatttcgttggaaacgggattacatacaaaaagcagacagcagcattctcagaaacttctttgtgatgtttgcattcaagtcacagagttgaacattccctttcatagagcaggttggaaacactctttttgtagtatctggatgtggacatttggatcgctttcaggcctatggtgaaaaaggaaatatcttcccatgaaaactagacagaagcattctcagaaacttatttgcgatgtgtgccctcaactgacagtgttgaacctttgttttgatagagcagttctgaaacacactttttgtaaaatctgcaagaggatatttggatagctttgaggatttcgttggaaacgggaatgtcttcatgtaaactctggacagaagcattctcagaaactgctttgggatgtttcaattgaagtcccagtgttgaacattccctttcatagagcaggtttgaaacactctttttgtactatctggaagtggacatttggagcgctttcaggtctacggtgaaaaaggagatatcttccaataaaaactagatagaagcaatgtcagaacttttttcatgatgtatctactcagcaaacagagttgaacctttcttttgagagagcagttttgaaacactctttttgtggaatatgcaagtgggtattaggccagcttggaggatttcgttggaaacgggaatacgtataaaaagcagacagcagcattgtcagaaactactttgtgatgtttgcattcaagtcacagaattgaacactccctttcacagagcaggtttgaaacactctttttgtagtgtctgtaagtgaacatttggattgctttcaggcctaaggtgaaaaagggaaatatcttcccataaaaactagacagaagcattctcagaaacttgtttgtgatgtgtgccctctactgacagagttgaacctttcattgcaaagaccagttttgaaacactctttttgtagaatctgcaagaggatatttggatagctttgaggatttcttgggaaacgggaatgtcttcagataaactctagacagaagcattctcagaaacttctttgggatgtttcaattgaagtcacagtgttgaacattccctttcacagagcaggtttgaaacactctttttgtagtgtctataattgaacatttggcgtgctttcaggcctaacgtgaaaaaggaaatatcttcccataaaaactagacagaagcattctcagaaacttgttcgtgatgtgtgccctctactgacagagttgaacctttctttgcaaagagcagctttgaaacactctttttgtagaatctgcaagaggatatgtggatagctttgaggatttcgttggaaacgggtatgtcttcagataaactctagacagaagcattctcagaaacttctttgggatgtttcaattgaagtcacagtgttgaacattccctttcacagagcaggtttgaaacactctttttgtagtgtctataagtgaacatttggcgtgctttcaggcctaacgtgaaaaaggaaatatcttcccataaaaactagacagaagcattctcagaaacttgttcatgatgtgtgccctctactgacagagttgaacctttctttgcaaagagcagctttgaaacactctttttgtagaatctgcaagaggatatttggatagctttgaggatttcgttggaaacgggtatgtcttcagataaactctagacagaagcattctcagaaacttctttgggatgttgcattcaagtcacagagtagaacattcccattcatagagcagatttgaaacactctttttgtagtatctggaagtggacatttggagcgctttcaggcctatgttgaaaaaggaaatatcttcccataaaaactagacggaagcattctcagaaacttacttgtgatgtgtttgctcaactaacagaattgaaccatcgttttgaaggagcagttttgaaacactgttttcgtggaatctgcaagtggatatttggctagctttgaggatttcgttggaaacgggattacatataaaaaggagacagcagcattctcagaaacttctttgtgatgtctgcattcaagtcacagagttgagcattccctttcatagagcaggttggaaacactctttttgtagtatctggatgaggacatttggagcgctttctggcctatggtgaaaaaggaaatatcttcctgtaaaaactagacagaagcattctcagaagtttatttgtgatgtgtgccctcaaataacagagttgaacctttcttttgatagagcagttttgaaacactctttttgtaaaatctgcaagaggatatttggatagctttgaggatttcgttgcaaacgggaatggcttcatataaactctagacagaagcattctcagaaacttcgttgggatgtttcgatggaagtcccagtgttgaacattcccttttatagagcaggttggaaacactctttctgcattccctggaagtggacatttggagcgctttcaggacgacggtgaaaatggaaatatcttccaataaaatctagatagaagcaacgtcagaaacttttatgtgatggatctactcagctaacagagttgaacctttcttttgagagagcagttttgcaacactctttttgtggaatatgcaagtggatattagggcagctttgaggatttcgttggaaacgggaatacatgtaaaaagcagacagcagcattctcagaaacttctttgtgatgtttgcattgaagtcacagagttgaacattccctttgagagagcaggtttgaaacacgccttttgtcatatctggaagtgtccattcggagcgcattcaggcttgtgttgaaaaaggaaatatcctcccataaaaactagacagaagcattctcagaaacttatctgtgatgtatgtactcaactaacagaactaaaccatcgttttgaaggagcagttttgaaacactctttttgcggaatctgcaagtggatatttggctagctgggaggatttcgttggaaatgggattacatacaaaaagcagacagcagcattctcagaaacttctttgtgatgtttgcattcaagtcacagagttgaacattccctttcatagagcaggtttgaaacactctttttgtagtatctggatgtggacatttggatcgctttcaggcctatggtgaaaaaggaaatatcttcccatgaaaactagacagaagcattctcagaaacttatttgtgatgtgtgccctcaactgacagtgttgaacctttgttttgatagagcagttctgaaacacactttttgtaaaatctgcaagaggatatttggatagctttgaggatttcgttggaaacgggaatgtcttcatgtaaactctggacagaagcattctcagaaactgctttgggatgtttcaattgaagtcccagtgttgaacattccctttcatagagcaggtttgaaacactctttttgtactatctggaagtggacatttggagcgctttcaggtctacggtgaaaaaggagatatcttccaataaaaactagatagaagcaatgtcagaacttttttcatgatgtatctactcagcaaacagagttgaacctttcttttgagagagcagttttgaaacactctttttgtggaatatgcaagtgggtattaggccagcttggaggatttcgttggaaacgggaatacgtataaaaagcagacagcagcattgtcagaaactactttgtgatgtttgcattcaagtcacagaattgaacactccctttcacagagcaggtttgaaacactctttttgtagtgtctgtaagtgaacatttggattgctttcaggcctaaggtgaaaaaggaaatatcttcccataaaaactagacagaagcattctcagaaacttgtttgtgatgtgtgccctctactgacagagttgaacctttctttgcaaagagcagttttgaaacactctttttgtagaatctgcaagaggatatttggatagctttgaggatttcttgggaaacgggaatgtcttcagataaactctagacagaagcattctcagaaacttctttgggatgtttcaattgaagtcacagtgttgaacattccctttcacagagcaggtttgaaacactctttttgtagtgtctataagtgaacatttggcgtgctttcaggcctaacgtgaaaaaggaaatatcttcccataaaaactagacagaagcattctcagaaacttgttcttgatgtgtcccctctactgacagagttgaacctttctttgcaaagagcagctttgaaacactctttttgtagaatctgcaagaggatatttggatagcttggaggatttcgttggaaacgggtatgtcttcagataaactctagacagaagcattctcagaaacttctttgggatgttgcattcaagtcacagagtagaacattcccattcatagagcagatttgaaacactctttttgtagtatctggaagtggacatttggagcgctttcaggcctatgttgaaaaaggaaatatcttcccataaaaactagacggaagcattctcagaaacttatttgtgatgtgtttgctcaactaacaggattgaaccatcgttttgaaggagcagttttgaaacactgttttcgtggaatctgcaagtggatatttggctagctttgaggatttcgttggaaacgggattacatataaaaaggagacagcagcattctcagaaacttctttgtgatgtttgcattcaagtcacagagttgaacattccctttcatagagcaggttggaaacactctttttgtagtatctggatgtggacatttggatcgctttcaggcctatggtgaaaaaggaaatatcttcccatgaaaactagacagaagcattctcagaaacttatttgtgatgtgtgccctcaactgacagtgttgaacctttgttttgatagagcagttctgaaacacactttttgtaaaatctgcaagaggatatttggatagctttgaggatttcgttggaaacgggaatgtcttcatgtaaactctagacagaagcattctcagaaactgctttgggatgtttcaattgaagtcccagtgctgaacattccctttcatagagcaggtttgaaacactctttttgtactatctcgaagtggacatttggagcgctttcaggtctacggtgaaaaaggagatatcttccaataaaaactagatagaagcaatgtcagaacttttttcatgatgtatctactcagcaaacagagttgaacctttcttttgagagagcagtttcgaaacactctttctgtggaatatgcaagtgggtattaggccagcttggaggatttcgttggaaacgggaatacgtataaaaagcagacagccagcattgtcagaaactactttgtgatgtttgcattcaagtcacagaattgaacactccctttcacagagcaggtttgaaacactctttttgtagtgtctgtaagtgaacatttggattgctttcaggcctaaggtgaaaaaggaaatatcttcccataaaaactagacagagcattctcagaaacttgtttgtgatgtgtgccctctactgacagatttgaacctttctttgcaaagagcagttttgaaacactctttttgtagaatctgcaagaggatatttggatagctttgaagatttcttgggaaacgggaatgtcttcagataaactctagacagaagcattctcagaaacttctttgggatgtttcaattgaagtcacagtgttgaacattccctttcacagagcaggtttgaaacactctttttgtagtgtgtataagtgaatatttcgcgtgctttcaggcctaacgtgaaaaaggaaatatcttcccataaaaactagacagaagcattctcagaaacttgttcatgatgtgtgccctctactgacagagttgaacctttctttgcaaagagcagctttgaaacactctttttgtagaatctgcaagaggatatttggatagctttgaggatttcgttggaaacgggtatgtcttcagataaactctagacagaagcattctcagaaacttctttgggatgttgcattcaagtcacagagtagaacattcccattcatagagcagatttgaaacactctttttgtagtatctggaagtggacatttggagcgctttcaggcctatgttgaaaaaggaaatatcttcccataaaaactagacggaagcattctcagaaacttacttgtgatgtgtttgctcaactaacagaattgaaccatcgttttgaaggagcagttttgaaacactgttttcgtggaatctgcaagtggatatttggctagctttgaggatttcgttggaaacgggattacatataaaaaggagacagcagcattctcagaaacttctttgtgatgtctgcattcaagtcacagagttgagcattccctttcatagagcaggttggaaacactctttttgtagtatctggatgaggacatttggagcgctttcaggcgtatggtgaaaaaggaaatatcttcccgtaaaaactagacagaagcattctcagaaatttatttgtgatgtgtgccctcaactaacagagttgaacctttcttttgatagagcagttttgaaacactctttttgtaaaatctgcaagaggatatttggatagcttgaggatttcgttgcaaacgggaatggcttcatataaactctagacagaagcattctcagaaacttcgttgggatgtttcgattgaagtcccagtgttgaacattcccttttatagagcaggttggaaacactctttctgcattccctggaagtggacatttggagggctttcaggacgacggtgaaaatggaaatatcttccaagaaaatctagatagaagcaatgtcagaaacttttatgtgatggatctactcagctaacagagttgaacctttcttttgagagagcagttttgcaacactctttttgtggaatatgcaagtggatattagggcagctttgaggatttcgttggaaacgggaatacatgtaaaaagcagacagcagcattctcagaaacttctttgtgatgtttgcattgaagtcacagagttgaacattccctttgagagagcaggtttgaaacacaccttttgtcatatctggaagtgtccattcggagcgcattcaggcttgtgttgaaaaaggaaatatcctcccataaaaactagacagaagcattctcagaaacttatctgtgatgtatgtactcaactaacagaactaaaccatcgttttgaaggagcagttttgaaacactctttttgcggaatctgcaagtggatatttggctagctgggaggatttcgttggaaacgggattacatacaaaaagcagacagcagcattctcagaaacttctttgtgatgtttgcattcaagtcacagagttgaacattccctttcatagagcaggtttgaaacactctttttgtagtatctggatgtggacatttggatcgctttcaggcctatggtgaaaaaggaaatatcttcccatgaaaactagacagaagcattctcagaaacttatttgtgatgtgtgccctcaactgacagtgttgaacctttgttttgatagagcagttctgaaacacactttttgtaaaatctgcaagaggatatttggatagctttgaggatttcgttggaaacgggaatgtcttcatgtaaactctacacagaagcattctcagaaactgctttgggatgtttcaattgaagtcccagtgttgaacattccctttcatagagcaggtttgaaacactctttttgtactatctggaagtggacatttggagcgctttcaggtctacggtgaaaaaggagatatcttccaataaaaactagatagaagcaatgtcagaacctttttcatgatgtatctactcagcaaacagagttgaacctttcttttgagagagcagttttgaaacactctttttgtggaatatgcaagtgggtattaggccagcttggaggatttcgttggaaacgggaatacgtataaaaagcagacagcagcattgtcagaaactactttgtgatgtttgcattcaagtcacagaattgaacactccctgtcacagagcaggtttgaaacactctttttgtagtgtctgtaagtgaacatttggattgctttcaggcctaaggtgaaaaaggaaatatcttcccataaaaactagacagaagcattctcagaaacttgtttgtgatgtgtgccctctactgacagagttgaacctttctttgcaaagagcagttttgaaacactctttttgtagaatctgcaagaggatatttggatagctttgaggatttcttgggaaacgggaatgtcttcagataaactctagacagaagcattctcagaaacttctttgggatatttcaattgaagtcacagtgttgaacattccctttcacagagcaggtttgaaacactctttttgtagtgtctataagtgaacatttggcgtgctttcaggcctaaggtgaaaaaggaaatatcttcccataaaaactagacagaagcattctcagaaacttgttcgtgatgtgtgccctctactgacagagttgaacctttctttgcaaagagcagctttgaaacactctttttgtagaatctgcaagaggatatttggatagctttgaggatttcgttggaaacgggtatgtcttcagataaactctagacagaagcattctcagaaacttctttgggatgttgcattcaagtcacagagtagaacattcccattcatagagcagatttgaaacactctttttgtagtatctggaagtggacatttggagcgctttcaggcctatgttgaaaaaggaaatatcttcccataaaaactagacggaagcattctcagaaacttacttgtgatgtgtttgctcaactaacagaattgaaccatcgttttgaaggagcagttttgaaacactgttttcgtggaatctgcaagtggatatttggctagctttgaggatttcgttggaaacgggattacatataaaaaggagacagcagcattctcagaaacttctttgtgatgtctgcattcaagtcacagagttgagcattccctttcatagagcaggttggaaacactctttttgtagtatctggatgaggacatttggagcgctttcaggcgtatggtgaaaaaggaaatatcttcccgtaaaaactagacagaagcattctcagaagtttatttgagatgtgtgccctcaactaacagagttgaacctttcttttgatagagcagttttgaaacactctttttgtaaaatctgcaagaggatatttggatagctttgaggatttcgttgcaaacgggaatggcttcatataaactctagacagaagcattctcagaaacttcgttgggatgttttgattgaagtcccagtgttgaacattcccttttatagagcaggttggaaacactctttctgcattccctggaagtggacatttggagcgctttcaggacgacggtgaaaatggaaatatcttccaataaaatctagatagaagcaatgtcagaaacttttctgtgatggatctactcagctaacagagttgaacctttcttttgagagagcagttttgcaacactctttttgtggaatatgcaagtggatattagggcagctttgaggatttcgttggaaacgggaatacatgtaaaaagcagacagcagcattctcagaaacttctttgtgatgtttgcattgaagtcacagagttgaacattccctttgagagagcaggtttgaaacacgccttttgtcatatctggaagtgtccattcggagcgcattcaggcttgtgttgaaaaaggaaatatcctcccataaaaactagacagaagcattctcagaaacttatctgtgatgtatgtactcaactaacagaactaaaccatcgttttgaaggagcagttttgaaacactctttttgcggaatctgcaagtggatatttggctagctgggaggatttcgttggaaacgggattacatacaaaaagcagacagcagcattctcagaaacttctttgtgatgtttgcattcaagtcacagagttgaacattccctttcatagagcaggtttgaaacactctttttgtagtatctggatgtggacatttggatcgctttcaggcctatggtgaaaaaggaaatatcttcccatgaaaactagacagaagcattctcagaaacttatttgtgatgtgtgccctcaactgacagtgttgaacctttgttttgatagagcagttctgaaacacactttttgtaaaatctgcaagaggatatttggatagctttgaggatttcgttggaaacgggaatgtcttcatgtaaactctagacagaagcattctcagaaactgctttgggatgtttcaattgaagtcccagtgttgaacattccctttcatagagcaggtttgaaacactctttttgtactatctggaagtggacatttggagcgctttctggtctacggtgaaaaaggagatatcttccaataaaaactagatagaagcaatgtcagaacttttttcatgatgtatctactcagcaaacagagttgaacctttcttttgagagagcagttttgaaacactctttttgtggaatatgcaagtgggtattaggccagcttggaggatttcgttggaaacgggaatacgtataaaaagcagacagcagcattgtcagaaactactttgtgatgtttgcattcaagtcacagaattgaacactccctttcacagagcaggtttgaaacactctttttgtagtgtctgtaagtgaacatttggattgctttcaggcctaaggtgaaaaaggaaatatcttcccataaaaactagacagaagcattctcagaaacttgtttgtgatgtgtgccctctactgacagagttgaacctttctttgcaaagagcagttttgaaacactctttttgtagaatctgcaagaggatatttggatagctttgaggatttcttgggaaacgggaatgtcttcagataaactctagacagaagcattctcagaaacttctttgggatgtttcaattgaagtcacagtgttgaacattccctttcacagagcaggtttgaaacactctttttgtagtgtctataagtgaacatttggcgtgctttcaggcctaacgtgaaaaaggaaatatcttcccataaaaactagacagaagcattctcagaaacttgttcgtgatgtgtgccctctactgacagacttgaacctttctttgcaaagagcagctttgaaacattctttttgtagaatctgccagaggatatttggatagctttgaggatttcgttggaaacgggtatgtcttcagataaactctagacagaagcattctcagaaacttctttgggatgttgcattcaagtcacagagtagaacattcccattcatagagcagatttgaaacactctttttgtagtatctggaagtggacatttggagcgctttcaggcctatgttgaaaaaggaaatatcttcccataaaaactagacggaagcattctcagaaacttatttgtgatgtgtttgctcaactaacaggattgaaccatcgttttgaaggagcagttttgaaacactgttttcgtggaatctgcaagtggatatttggctagctttgaggatttcgttggaaacgggattacatataaaaaggagacagcagcattctcagaaacttctttgtgatgtctgcattcaattcacagagttgagcattccctttcatagagcaggttggaaacactctttttgtagtatctggatgaggacatttggagcgctttcaggcgtatggtgaaaaaggaaatatcttcccgtaaaaactagacagaagcattctcagaagtttatttgtgatgtgtgccctcaactaacagacttgaacctttcttttgatagagcagttttgaaacactcattttgtaaaatctgcaagaggatatttggatagctttgaggatttcgttgcaaacgggaatggcttcatataaactctagacagaagcattctcagaaacttcgttgggatgtttcgattgaagtcccagtgttgaacattcccttttatagagcaggttggaaacactctttctgcattccctggaagtggacatttggagcgctttcaggacgacggtgaaaatggaaatatcttccaataaaatctagatagaagcaacgtcagaaacttttctgtgatggatctactcagctaacagagttgaacctttcttttgagagagcagttttgcaacactctttttgtggaatatgcaagtggatattagggcagctttgaggatttcgttggaaacgggaatacatgtaaaaagcagacagcagcattctcagaaacttctttgtgatgtttgcattgaagtcacagagttgaacattccctttgagagagcaggtttgaaacacgccttttgtcatatctggaagtgtccattcggagcgcattcaggcttgtgttgaaaaaggaaatatcctcccataaaaactagacagaagcattctcagaaacttatctgtgatgtatgtactcaactaacagaactaaaccaccgttttgaaggagcagttttgaaacactctttttgcggaatctgcaagtggatatttggctagctgggaggatttcgttggaaacgggattacatacaaaaagcagacagcagcattctcagaaacttctttgtgatgtttgcattcaagtcacagagttgaacattccctttcatagagcaggtttgaaacactctttttgtagtatctggatgtggacatttggatcgctttcaggcctatggtgaaaaaggaaatatcttcccatgaaaactagacagaagcattctcagaaacttatttgtgatgtgtgccctcaactgacagtgttgaacctttgttttgatagagcagttctgaaacacactttttgtaaaatctgcaagaggatatttggatagctttgaggatttcgttggaaacgggaatgtcttcatgtaaactctacacagaagcattctcagaaactgctttgggatgtttcaattgaagtcccagtgttgaacattccctttcataggagcaggtttgaaacactctttttgtactatctggaagtggacatttggagcgctttcaggtctacggtgaaaaaggagatatcttccaataaaaactagatagaagcaatgtcagaacttttttcatgatgtatctactcagcacacagagttgaacctttcttttgagagagcagttttgaaacactctttttgtggaatatgcaagtgggtattaggccagcttggaggatttcgttggaaacgggaatacgtataaaaagcagacagcagcattgtcagaaactactttgtgatgtttgcattcaagtcacagaattgaacactccctttcacagagcaggtttgaaacactctttttgtagtgtctgtaagtgaacatttggattgctttcaggcctaaggtgaaaaaggaaatatcttcccataaaaactagacagaagcattctcagaaacttgtttgtgatgtgtgccctctactgacagagttgaacctttctttgcaaagaccagttttgaaacactctttttgtagaatctgcaagaggatatttggatagctttgaggatttcttgggaaacgggaatgtcttcagataaactctagacagaagcattctcagaaacttctttgggatgtttcaattgaagtcacagtgttgaacattccctttcacagagcaggtttgaaacactctttttgtagtgtctataagtgaacatttggcgtactttcaggcctaacgtgaaaaaggaaatatcttcccataaaaactagatagaagcattctcagaaacttgttcgtgatgtgtgccctctactgacagagttgaacctttctttgcaaagagcagctttgaaacactctttctgtagaatctgcaagaggatatttggatagcttggaggatttcgttggaaacgggtatgtcttcagataaactctagacagaagcattctcagaaacttctttgggatgttgcattcaagtcacagagtagaacattcccattcatagagcagatttgaaacactctttttgtagtatctggaagtggacatttggagcgctttcaggcctatgttgaaaaaggaaatatcttcccataaaaactagacggaagcattctcagaaacttatttgtgatgtgtttgctcaactaacaggattgaaccatcgttttgaaggagcagttttgaaacactgttttcgtggaatctgcaagtggatatttggctagctttgaggatttcgttggaaacgggattacatataaaaaggagacagcagcattctcagaaacttctttgtgatgtctgcattcaattcacagagttgagcattccctttcatagagcaggttggaaacactctttttgtagtatctggatgaggacatttggagcgctttcaggcgtatggtgaaaaaggaaatatcttcccgtaaaaactagacagaagcattctcagaagtttatttgtgatgtgtgccctcaactaacagagttgaacctttcttttgatagagcagttttgaaacactctttttgtaaaatctgcaagaggatatttggatagctttgaggatttcgttgcaaacgggaatggcttcatataaactctagacagaagcattctcagaaacttcgttgggatgtttcgattgaagtcccagtgttgaacattcccttttatagagcaggttggaaacactctttctgcattccctggaagtggacatttggagcgctttcaggacgacggtgaaaatggaaatatcttccaagaaaatctagatagaagcaatgtcagaaacttttatgtgatggatctactcagctaacagagttgaacctttcttttgagagagcagttttgcaacactctttttgtggaatatgcaagtggatattagggcagctttgaggatttcgttggaaacgggaatacatgtaaaaagcagacagcagcattctcagaaacttctttgtgatgtttgcattgaagtcacagagttgaacattccctttgagagagcaggtttgaaacacgccttttgtcatatctggaagtgtccattcggagcgcattcaggcttgtgttgaaaaaggaaatatcctcccataaaaactagacagaagcattctcagaaacttatctgtgatgtatgtactcaactaacagaactaaaccatcgttttgaaggagcagttttgaaacactctttttgcggaatctgcaagtggatatttggctagctgggaggatttcgttggaaacgggattacatacaaaaagcagacagcagcattctcagaaacttctttgtgatgtttgcattcaagtcacagagttgaacattccctttcatagagcaggtttgaaacactctttttgtagtatctggatgtggacatttggatcgctttcaggcctatggtgaaaaaggaaatatcttcccatgaaaactagacagaagcattctcagaaacttatttgtgatgtgtgccctcaactgacagtgttgaacctttgttttgatagagcagttctgaaacacaccttttgtaaaatctgcaagaggatatttggatagctttgaggatttcgttggaaacgggaatgtcttcatgtaaactctacacagaagcattctcagaaactgctttgggatgtttcaattgaagtcccagtgttgaacattccctttcatagagcaggtttgaaacactctttttgtactatctggaagtggacatttggagcgctttcaggtctacggtgaaaaaggagatatcttccaataaaaactagatagaagcaatgtcagaacttttttcatgatgtatctactcagcaaacagagttgaacctttcttttgagagagcagttttgaaacactctttttgtggaatatgcaagtgggtattaggccagcttggaggatttcgttggaaacgggaatacgtataaaaagcagacagcagcattgtcagaaactactttgtgatgtttgcattcaagtcacagaattgaacactccctttcacagagcaggtttgaaacactctttttgtagtgtctgtaagtgaacatttggattgctttcaggcctaaggtgaaaaaggaaatatcttcccataaaaactagacagaagcattctcagaaacttgtttgtgatgtgtgccctctactgacagagttgaacctttctttgcaaagagcagctttgaaacactctttttgtagaatctgcaagaggatatttggatagctttgaggatttcttgggaaacgggaatgtcttcagataaactctagacagaagcattctcagaaacttctttgggatgtttcaattgaagtcagtgttgaacattccctttcacagagcaggtttgaaacactctttttgtagtgtctataagtgaacatttggcgtgctttcaggcctaacgtgaaaaaggaaatatcttcccataaaaactagacagaagcattctcagaaacttgttcttgatgtgtcccctctactgacagagttgaacctttctttgcaaagagcagctttgaaacactctttttgtagaatctgcaagaggatatttggatagcttggaggatttcgttggaaacgggtatgtcttcagataaactctagacagaagcattctcagaaacttctttgggatgttgcattcaagtcacagagtagaacattcccattcatagagcagatttgaaacactctttttgtagtatctggaagtggacatttggagcgctttcaggcctatgttgaaaaaggaaatatcttcccataaaaactagacggaagcattctcagaaacttatttgtgatgtgtttgctcaactaacaggattgaaccatcgttttgaaggagcagttttgaaacactgttttcgtggaatctgcaagtggatatttggttagctttgaggatttcgttggaaacgggattacatataaaaaggagacagcagcattctcagaaacttctttgtgatgtctgcattcaattcacagagttgagcattccctttcatagagcaggttggaaacactctttttgtagtatctggatgaggacatttggagcgctttcaggcgtatggtgaaaaaggaaatatcttcccgtaaaaactagacagaagcattctcagaagtttatttgtgatgtgtgccctcaactaacagagttgaacctttcttttgatagagcagttttgaaacactctttttgtaaaatctgcaagaggatatttggatagctttgaggatttcgttgcaaacgggaatggcttcatataaactctagacagaagcattctcagaaacttcgttgggatgtttcgattgaagtcccagtgttgaacattcccttttatagagcaggttggaaacactctttctgcattccctggaagtggacatttggagcgctttcaggacgacggtgaaaatggaaatatcttccaagaaaatctagatagaagcaacgtcagaaacttttatgtgatggatctactcagctaacagagttgaacctttcttttgagagagcagttttgcaacactctttttgtggaatatgcaagtggatattagggcagctttgaggatttcgttggaaacgggaatacatgtaaaaagcagacagcagcattctcagaaacttctttgtgatggttgcattcaagtcacagagttgaacattccctttgagagagcaggtttgaaacacgccttttgtcatatctggaagtgtccattcggagcgcattcaggcttgtgttgaaaaaggaaatatcctcccagaaaaactagacagaagcattctcagaaacttatctgtgatgtatgtactcaactaacagaactaaaccatcgttttgaaggagcagttttgaaacactctttttgcggaatctgcaagtggatatttggctagctgggaggatttcgttggaaacgggattacatacaaaaagcagacagcagcattctcagaaacttctttgtgatgtttgcattcaagtcacagagttgaacattccctttcatagagcaggtttgaaacactctttttgtagtatctggatgtggacatttggatcgctttcaggcctatggtgaaaaaggaaatatcttcccatgaaaactagacagaagcattctcagaaacttatttgtgatatgtgccctcaactgacagtgttgaacctttgttttgatagagcagttctgaaacacactttttgtaaaatctgcaagaggatatttggatagctttgaggatttcgttggaaacgggaatgtcttcatgtaaactctacacagaagcattctcagaaactgctttgggatgtttcaattgaagtcccagtgttgaacattcccattcatagagcaggtttgaaacactctttttgtactatctggaagtggacatttggagcgctttcaggtctacggtgaaaaaggagatatcttccaataaaaactagatagaagcaatgtcagaacttttttcatgatgtatctactcagctaacagagttgaacctttcttttgagagagcagttttgaaacactctttttgtggaatatgcaagtgggtattaggccagcttggaggatttcgttggaaacgggaatacgtataaaaagcagacagcagcattgtcagaaactactttgtgatgtttgcattcaagtcacagaattgaacactccctttcacagagcaggtttgaaacactctttttgtagtgtctgtaagtgaacatatggattgctttcaggcctaaggtgaaaaaggaaatatcttcccataaaaactagacagaagcattctcagaaacttgtttgtgatgtgtgccctctactgacagagttgaacctttctttgcaaagagcagctttgaaacactctttttgtagaatctgcaagaggatatgtggatagctttgaggatttcgttggaaacgggtatgtcttcagataaactctagacagaagcattctcagaaacttctttgggatgtttcaattgaagtcacagtgttgaacattccctttcacagagcaggtttgaaacactctttttgtagtgtctataagtgaacatttggcgtgctttcaggcctaacgtgaaaaaggaaatgtcttcccataaaaactagacagaagcattctcagaaacttgttcatgatgtgtgccctctactgacagagttgaacctttctttgcaaagagcagctttgaaacactctttttgtagaatctgcaagaggatatttggatagctttgaggatttcgttggaaacgggtatgtcttcagataaactctagacagaagcattctcagaaacttctttgggatgttgcattcaagtcacagagtagaacattcccattcatagagcagatttgaaacactctttttgtagtatctggaagtggacatttggagcgctttcaggcctatgttgaaaaaggaaatatcttcccataaaaactagacggaagcattctcagaaacttacttgtgatgtgtttgctcaactaacagaattgaaccatcgttttgaaggagcagttttgaaacactgttttcgtggaatctgcaagtggatatttggctagctttgaggatttcgttggaaacgggattacatataaaaaggagacagcagcattctcagaaacttctttgtgatgtctgcattcaagtcacagacttgagcattccctttcatagagcaggttggaaacactctttttgtagtatctggatgaggacatttggagcgctttcaggcgtatggtgaaaaaggaaatatcttcccgtaaaaactagacagaagcattctcagaaatttatttgtgatgtgtgccctcaactaacagagttgaacctttcttttgatagagcagttttgaaacactctttttgtaaaatctgcaagaggatatttggatagctttgaggatttcattgcaaacgggaatggcttcatataaactctagacagaagcattctcagaaacttcgttgggatgtttcgattgaagtcccagtgttgaacattcccttttatagagcaggttggaaacactctttctgcatttcctggaagtggacatttggagcgctttcaggacgacggtgaaaatggaaatatcttccaagaaaatctagatagaagcaacgtcagaaacttttatgtgatggatctactcagctaacagagttgaacctttcttttgagagagcagttttgcaacactctttttgtggaatatgcaagtggatattagggcagctttgaggatttcgttggaaacgggaatacatgtaaaaagcagacagcagcattctcagaaacttctttgtgatgtttgcattgaagtcacagagttgaacattccctttgagagagcaggtttgaaacacgccttttgtcatatctggaagtgtccattcggagcgcattcaggcttgtgttgaaaaaggaaatatcctcccataaaaactagacagaagcattctcagaaacttatctgtgatgtatgtactcaactaacagaactaaaccatcgttttgaaggagcagttttgaaacactctttttgcggaatctgcaagtggatatttggctagctgggaggatttcgttggaaacgggattacatacaaaaagcagacagcagcattctcagaaacttctttgtgatgtttgcattcaagtcacagagttgaacattccctttcatagagcaggtttgaaacactctttttgtagtaactggatgtggacatttggatcgctttcaggcctatggtgaaaaaggaaatatcttcccatgaaaactagacagaagcattctcagaaacttatttgtgatgtgtgccctcaactgacagtgttgaacctttgttttgatagagcagttctgaaacacactttttgtaaaatctgcaagaggatatttggatagctttgaggatttcgttggaaacgggaatgtcttcatgtaaactctagacagaagcattctcagaaactgctttgggatgtttcaattgaagtcccagtgttgaacattccctttcatagagcaggtttgaaacactctttttgtactatctggaagtggacatttggagcgctttcaggtctacggtgaaaaaggagatatcttccaataaaaactagatagaagcaatgtcagaacttttttcatgatgtatctactcagcaaacagagttgaacctttcttttgagagagcagttttgaaacactctttttgtggaatatgcaagtgggtattaggccagcttggaggatttcgttggaaacgggaatacgtataaaaagcagacagcagcattgtcagaaactactttgtgatgtttgcattcaagtcacagaattgaacactccctttcacagagcaggtttgaaacactctttttgtagtgtctgtaagtgaacatatggattgctttcaggcctaaggtgaaaaaggaaatatcttcccataaaaactagacagaaagcattctcagaaacttgtttgtgatgtgtgccctctactgacagagttgaacctttctttgcaaagagcagttttgaaacactctttttgtagaatctgcaagaggatatttggatagctttgaggatttcttgggaaacgggaatgtcttcagataaactctagacagaagcattctcagaaacttctttgggatgtttcaattgaagtcacagtgttgaacattccctttcacagagcaggtttgaaacactctttttgtagtgtctataagtgaacatttggcgtgctttcaggcctaacgtgaaaaaggaaatatcttcccataaaaactagacagaagcattctcagaaacttgttcttgatgtgtcccctctactgacagaattgaacctttctttgcaaagagcagctttgaaacactctttttgtagaatctgcaagaggatatttggatagcttggaggatttcgttggaaacgggtatgtcttcagataaactctagacagaagcattctcagaaacttctttgggatgttgcattcaagtcacagagtagaacattcccattcatagagcagatttgaaacactctttttgtagtatctggaagtggacatttggagcgctttcaggcctatgttgaaaaaggaaatatcttcccataaaaactagacggaagcattctcagaaacttatttgtgatgtgtttgctcaactaacaggattgaaccatcgttttgaaggagcagttttgaaacactgttttcgtggaatctgcaagtggatatttggctagctttgaggatttcgttggaaacgggattacatataaaaaggagacagcagcattctcagaaacttctttgtgatgtctgcattcaattcacagagttgagcattccctttcatagagcaggttggaaacactctttttgtagtatctggatgaggacatttggagcgctttcaggcctatggtgaaaaaggaaatatcttcccgtaaaaactagacagaagcattctcagaagtttatttgtgatgtgtgccctcaactaacagagttgaacctttcttttgatagagcagttttgaaacactctttttgtaaaatctgcaagaggatatttggatagctttgaggatttcgttgcaaacgggaatggcttcatataaactctagacagaagcattctcagaaacttcgttgggatgtttcgattgaagtcccagtgttgaacattcccttttatagagcaggttggaaacactctttctgcattccctggaagtggacatttggagcgctttcaggacgacggtgaaaatggaaatatcttccaagaaaatctagatagaagcaatgtcagaaacttttatgtgatggatctactcagctaacagagttgaacctttcttttgagagagcagttttgcaacactctttttgtggaatatgcaagtggatattagggcagctttgaggatttcgttggaaacgggaatacatgtaaaaagcagacagcagcattctcagaaacttctttgtgatgtttgcattgaagtcacagagttgaacattccctttgagagagcaggtttgaaacacgccttttgtcatatctggaagtgtccattcggagcgcattcaggcttgtgttgaaaaaggaaatatcctcccataaaaactagacagaagcattctcagaaacttatctgtgatgtatgtactcaactaacagaactaaaccatcgttttgaaggagcagttttgaaacactctttttgcggaatctgcaagtggatatttggctagctgggaggatttcgttggaaacgggattacatacaaaaagcagacagcagcattctcagaaacttctttgtgatgtttgctttcaagtcacagagttgagcattccctttcatagagcaggttggaaacactctttttgtagtatctggatgtggacatttggatcgctttcaggcctatggtgaaaaaggaaatatcttcccatgaaaactagacagaagcattctcagaaacttatttgtgatgtgtgccctcaactgacagtgttgaacctttgttttgatagagcagttctgaaacacactttttgtaaaatctgcaagaggatatttggatagctttgaggatttcgttggaaacgggaatgtcttcatgtaaactctagacagaagcattctcagaaactgctttgggatgtttcaattgaagtcccagtgttgaacattccctttcatagagcaggtttgaaacactccttttgtactatctggaagtggacatttggagcgctttcaggtctacggtgaaaaaggagatatcttccaataaaaactagatagaagcaatgtcagaacttttttcatgatgtatctactcagcaaacagagttgaacctttcttttgagagagcagttttgaaacactctttttgtggaatatgcaagtgggtattaggccagcttggaggatttcgttggaaacgggaatacgtataaaaagcagacagcagcattgtcagaaactactttgtgatgtttgcattcaagtcacagaattgaacactccctttcacagagcaggtttgaaacactctttttgtagtgtctgtaagtgaacatatggattgctttcaggcctaaggtgaaaaaggaaatatcttcccataaaaactagacagaagcattctcagaaacttgtttgtgatgtgtgccctctactgacagagttgaacctttctttgcaaagagcagttttgaaacactctttttgtagaatctgcaagaggatatttggatagctttgaggatttcttgggaaacgggaatgtcttcagataaactctagacagaagcattctcagaaacttctttgggatgtttcaattgaagtcacagtgttgaacattccctttcacagagcaggtttgaaacactctttttgtagtgtctataagtgaacatttggcgtgctttcaggcgtaacgtgaaaaaggaaatatcttcccataaaaactagacagaagcattctcagaaacttgttcgtgatgtgtgccctctactgacagagttgaacctttctttgcaaagagcagctttgaaacacactttttgtagaatctgcaagaggatatttggatagctttgaggatttcgttggaaacgggtatgtcttcagataaactctagacagaagcattctcagaaacttctttgggatgttgcattcaagtcacagagtagaacattcccattcatagagcagatttgaaacactctttttgtagtatctggaagtggacatttggagcgctttcaggcctatgttgaaaaaggaaatatcttcccataaaaactagacggaagcattctcagaaacttatttgtgatgtgtttgctcaactaacaggattgaaccatcgttttgaaggagcagttttgaaacaatgttttcgtagaatctgcaagtggatatttggctagtttgaggatttggttggaaacgggattacatataaaaaggagacagcagcattctcagaaacttctttgtgatgtctgcattcaagtcacagagttgagcattccctttcatagagcaggttggaaacactctttttgtagtatctggatgaggacatttggagcgctttcaggcgtatggtgaaaaaggaaatatcttcccgtaaaaactagacagaagcattctcagaaatttatttgtgatgtgtgccctcaactaacagagttgaacctttcttttgatagagcagttttgaaacactctttttgtaaaatctgcaagaggatatttggatagctttgaggatttcgttgcaaacgggaatggcttcatataaactctagacagaagcattctcagaaacttcgttgggatgtttcgattgaagtcccagtgttgaacattcccttttatagagcaggttggaaacactctttctgcattccctggaagtggacatttggagcgctttcaggacgacggtgaaaatggaaatatcttccaagaaaatctagatagaagcaacgtcagaaacttttctgtgatggatctactcagctaacagagttgaacctttcttttgagagagcagttttgcaacactctttttgtggaatatgcaagtggatattagggcagctttgaggatttcgttggaaacgggaatacatgtaaaaagcagacagcagcattctcagaaacttctttgtgatgtttgcattgaagtcacagagttgaacattccctttgagagagcaggtttgaaacacaccttttgtcatatctggaagtgtccattcggagcgcattcaggcttgtgttgaaaaaggaaatatcctcccataaaaactagacagaagcattctcagaaacttatctgtgatgtatgtactcaactaacagaactaaaccatcgttttgaagggcagttttgaaacactctttttgcggaatctgcaagtggatatttggctagctgggaggatttcgttggaaacgggattacatacaaaaagcagacagcagcattctcagaaacttctttgtgatgtttgcattcaagtcacagagttgaacattccctttcatagagcaggtttgaaacactctttttgtagtatctggatgtggacatttggatcgctttcaggcctatggtgaaaaaggaaatatcttcccatgaaaactagacagaagcattctcagaaacttatttgtgatgtgtgccctcaactgacagtgttgaacctttgttttgatagagcagttctgaaacacactttttgtaaaatctgcaagaggatatttggatagctttgaggatttcgttggaaacgggaatgtcttcatgtaaactctacacagaagcattctcagaaactgctttgggatgtttcaattgaagtcccagtgttgaacattcccattcatagagcaggtttgaaacactctttttgtactatctggaagtggacatttggagcgctttcaggtctacggtgaaaaaggagatatcttccaataaaaactagatagaagcaatgtcagaacttttttcatgatgtatctactcagcaaacagagttgaacctttcttttgagagagcagttttgaaacactctttttgtggaatatgcaagtgggtattaggccagcttggaggatttcgttggaaacgggaatacgtataaaaagcagacagcagcattgtcagaaactactttgtgatgtttgcattcaagtcacagaattgaacactccctttcacagagcaggtttgaaacactctttttgtagtgtctgtaagtgaacatttggattgctttcaggcctaaggtgaaaaaggaaatatcttcccataaaaactagacagaagcattctcagaaacttgtttgtgatgtgtgccctctactgacagagttgaacctttctttgcaaagagcagtttggaaacactctttttgtagaatctgcaagaggatatttggatagctttgaggatttcttgggaaacgggaatgtcttcagataaactctagacagaagcattctcagaaacttctttgggatgtttcaattgaagtcacagtgttgaacattccctttcacagagcaggtttgaaacagtctttttgtagtgtctataagtgaacatttggcgtgctttcaggcctaacgtgaaaaaggaaatctcttcccataaaaactagacagaagcattctcagaaacttgtttgtgatgtgtgccctctactgacagagttgaacctttctttgcaaagagcagctttgaaacactctttttgtagaatctgcaagaggatatttggatagctttgaggatttcgttggaaacgggtatgtcttcagataaactctagacagaagcattctcagaaacttctttgggatgttgcattcaagtcacagagtagaacattcccattcatagagcagatttgaaacactcttttgtagtatctggaagtggacatttggaacgctttcaggcctatgttgaaaaaggatatatcttcccataaaaactagacggaagcattctcagaaacttacttgtgatgtgtttgctcaactaacagaattgaaccatcgttttgaaggagcagttttgaaacactgttttcgtggaatctgcaagtggatatttggctagctttgaggatttcgttggaaacgggattacatataaaaaggagacagcagcattctcagaaacttctttgtgatgtctgcattcaagtcacagagttgagcattccctttcatagagcaggttggaaacactctttttgtagtatctggatgaggacatttggagcgctttcaggcgtatggtgaaaaaggaaatatcttcccgtaaaaactagacagaagcattctcagaaatttatttgtgatgtgtgccctcaactaacagagttgaacctttcttttgatagagcagttttgaaacactctttttgtaaaatctgcaagaggatatttggatagctttgaggatttcgttgcaaacgggaatggcttcatataaactctagacagaagcattctcagaaacttcgttgggatgtttcgattgaagtcccagtgttgaacattcccttttatagagcaggttggaaacactctttctgcattccctggaagtggacatttggagcgctttcaggacgacggtgaaaatggaaatatcttccaagaaaatctagatagacgcaacgtcagaaacttttctgtgatggatctactcagctaacagagttgaacctttcttttgagagagcagttttgcaacactctttttgtggaatatgcaagtggatattagggcagctttgaggatttcgttggaaacgggaatacatgtaaaaagcagacagcagcattctcagaaacttctttgtgatgtttgcattgaagtcacagagttgaacattccctttgagagagcaggtttgaaacacgccttttgtcatatctggaagtgtccattcggagcgcattcaggcttgtgttgaaaaaggaaatatcctcccataaaaactagacagaagcattctcagaaacttatctgtgatgtatgtactcaactaacagaactaaaccatcgttttgaaggagcagttttgaaacactctttttgcggaatctgcaagtggatatttggctagctgggaggatttcgttggaaacgggattacatacaaaaagcagacagcagcattctcagaaacttctttgtgatgtttgcattcaagtcacagagttgaacattccctttcatagagcaggtttgaaacactctttttgtagtatctggatgtggacatttggatcgctttcaggcctatggtgaaaaaggaaatatcttcccatgaaaactagacagaagcattctcagaaacttatttgtgatgtgtgccctcaactgacagtgttgaacctttgttttgatagagcacttctgaaacacactttttgtaaaatctgcaagaggatatttggatagctttgaggatttctttggaaacgggaatgtcttcatgtaaactctacacagaagcattctcagaaacagctttgggatgtttcaattgaagtcccagtgttgaacattccctttcatagagcaggtttgaaacactctttttgtactatctggaagtggacatttggagcgctttcaggtctacggtgaaaaaggagatatcttccaataaaaactagatagaagcaatgtcagaacttttttcatgatgtatctactcagcaaacagagttgaaccttacttttgagagagcagttttgaaacactctttttgtggaatatgcaagtgggtattaggccagcttggaggatttcgttggaaacgggaatacgtataaaaagcagacagcagcgttgtcagaaacttctttgtgatgtttgcattcaagtcacagaattcaacattccctttcacagagcagatttgaaacactctttttgtagtgtctgtaagtgaacatttggattgctttcagggctaaggtgaaaaaggaaatatcttcccataaaaacttgacagaagcattctcagaaactcttttgtgatgtgtgccctctactgacggagttgaacctttctttgcaatgagcagttttgaaaccatctttttgtagaatctgcaagaggatatttggatagctttgagtatttcttgggaaacgggaatgtcttcagataaactctagacagcagcattctcagaaacttctttgggatgtttcaattgaagtcacagtgttgaacattccctttcacagagcaggtttgaaacactctttttgtagtgtctataagtgaacatttggcgtgctttcaggcctaacgtgaaaaaggaaatctcttcccataaaaactagacagaagcattctcagaaacttgtttgtgatgtgtgccctctactgacagagttgaacctttctttgcaaagagcagctttgaaacactctttttgtagaatctgcaagaggatatttggatagctttgaggatttcgttggaaacgggtatgttttcagataaactctagacagaagcattctcagaaacttctttgggatgttgcattcaagtcacagagtagaacattcccattcatagagcagatttgaaacactctttgtgtagtatctggaagtggacatttggagcgctttcaggcctatgttgaaaaaggaaatatcttcccataaaaacaagacggaagcattctcagaaacttatttctgatgtgtttgctcaactaacagaattgaaccatcgttttgaaggagcagttttgaaacactgttttcgtggaatctgcaagtggatatttggctagctttgaggatttcgttggaaacgggattacctataaaaaggagacagcagcattctcagaaacttctttgtgatgtctgcattcaagtcacagagttgagcattccctttcatagagcaggttggaaacactctttttgtagtatctggatgaggacatttggagcgctttcaggcgtatggtgaaaaaggaaatatcttcccgtaaaaactagacagaagcattctcagaagtttatttgtgatgtgtgccctcaactaacagagttgaaactttcttttgatagagcagttttgaaacactcattttgtaaaatctgcaagaggatatttggatagctttgaggatttcgttgcaaacgggaatggcttcatataaactctagacagaagcattctcagaaacttcgtcgggatgtttcgattgaagtcccagtgttgaacattcccttttatagagcaggttggaaacactctttctgcattccctggaagtggacaattggagcgctttcaggacgacggtgaaaatggaaatatcttccaataaaatctggatagaagcaatgtcagaaactattctgtgatggatctactcagctaacagagttgaacctttcttttgagagagcagttttgcaacactctttttgtggaatatgcaagtggatattagggcagctttgaggatttcgttggaaacgggaatacatgtaaaaagcagacagcagcattctcagaaacttctttgtgatgtttgcattgaagtcacagagttgaacattccctttgagagagcaggtttgaaacacgccttttgtcatatctggaagtgtccattcggagcgcattcaggcttgtgttgaaaaagaaaatatcctcccataaaaactagacagaagcattctcagaaacttatctgtgatgtatgtactcaactaaccgaactaaaccatcgttttgaaggagcagttttgaaacactctttttgcggaatctgcaagtggatatttggctagctgggaggatttcgttggaaacgggattacatacaaaaagcagacagcagcattctcagaaacttctttgtgatgtttgcattcaagtcacagagttgaacattccctttcatagagtaggtttgaaacactctttttgtagtatctggatgtggacatttggatcgctttcaggcctatggtgaaaaaggaaatatcttcccatgaaaactagacagaagcattctcagaaacttgtttgtgatgtgtgccctcaactgacagtgttgaacctttgttttgatagagcagttctgaaacacactttttgtaaaatctgcaagaggatatttggatagctttgaggatttcgttggaaacggaaatgtcttcatgtaaactctacacagaagcattctcagaaactgctttgggatgtttcaattgaagtcccagtgttgaacattcccattcatagagcaggtttgaaacactctttttgtactatctggaagtggacatttggagcgctttcaggtctacggtgaaaaaggagatatcttccaataaaaactagatagaagcaatgtcagaacttttttcatgatgtatctactcagcaaacagagttgaacctttcttttgagagagcagttttgaaacactctttttgtggaatatgcaagtgggtattaggccagcttggaggatttcgttggaaacgggaatacgtataaaaagcagacagcagcattgtcagaaactactttgtgatgtttgcattcaagtcacagaattgaacactccctttcacagagcaggtttgaaacactctttttgtagtgtctgtaagtgaacatatggattgctttcaggcctaaggtgaaaaaggaaatatcttcccataaaaactagacagaagcattctcagaaacttgtttgtgatgtgtgccctctactgacagagttgaacctttctttgcaaagagcagttttgaaacactctttttgtagaatctgcaagaggatatttggatagctttgaggatttcttgggaaacgggaatgtcttcagataaactctagacagaagcattctcagaaacttctttgggatgtttcaattgaagtcacagtgttgaacattccctttcacagagcaggtttgaaacactctttttgtagtgtctataagtgaacatttggcgtgctttcaggcctaacgtgaaaaaggaaatatcttcccataaaaactagacagaagcattctcagaaacttgttcgtgatgtgtgccctctactgacagagttgaacctttctttgcaaagagcagctttgaaacacactttttgtagaatctgcaagaggatatttggatagtgtttgaggatttcgttggaaacgggtatgtcttcagataaactctagacagaagcattctcagaaacttctttgggatgttgcattcaagtcacagagtagaacattcccattcatagagcagatttgaaacactctttttgtagtatctggaagtggacatttggagcgctttcaggcctatgttgaaaaaggaaatatcttcccataaaaactagacggaggcattctcagaaacttatttgtgatgtgtttgctcaactaacaggattgaaccatcgttttgaaggagcagttttgaaacactgttttcgtggaatctgcaagtggatatttggctagccttgaggatttcattggaaacgggattacatataaaaaggagacagcagcattctcagaaacttctttgtgatgtctgcattcaattcacagagttcagcattccctttcatagagcaggttggaaacactctttttgtagtatctggatgaggacatttggagcgctttcaggcctatggtgaaaaaggaaatatcttcccgtaaaaactagacagaagcattctcagaaatttatttgtgatgtgtgccctcaactaacagagttgaacctttcttttgatagagcagttttgaaacactctttttgtaaaatctgcaagaggatatttggatagctttgaggatttcgttgcaaacgggaatggcttcatataaactctagacagaagcattctcagaaacttcgttgggatgtttcgattgaagtcccagtgttgaacattcccttttatagagcaggttggaaacactctttctgcattccctggaagtggacatttggagcgctttcaggacgacggtgaaaatggaaatatcttccaagaaaatctagatagaagcaatgtcagaaacttttatgtgatggatctactcagctaacagagttgaacctttcttttgagagagcagttttgcaacactctttttgtggaatatgcaagtggatattagggcagctttgaggatttcgttggaaacgggaatacatgtaaaaagcagacagcagcattctcagaaacttctttgtgatgtttgcattgaagtcacagagttgaacattccctttgagagagcaggtttgaaacacgccttttgtcatatctggaagtgtccattcggagcgcattcaggcttgtgttgaaaaaggaaatatcctcccataaaaactagacagaagcattctcagcaaacttatctgtgatgtatgtactcaactaacagaactaaaccatcgttttgaaggagcagttttgaaacactctttttgcggaatctgcaagtggatatttggctagctgggaggatttcgttggaaacgggattacatacaaaaagcagagagcagcattctcagaaacttctttgtgatgtttgcattcaagtcacagagttgaacattccctttcatagagcaggtttgaaacactctttttgtagtatctggatgtggacatttggatcgctttcaggcctatggtgaaaaaggaaatatcttcccatgaaaactagacagaagcattctcagaaacttatttgtgatgtgtgccctcaactgacagtgttgaacctttgttttgatagagcagttctgaaacacactttttgtaaaatctgcaagaggatatttggatagctttgaggatttcgttggaaacgggaatgtcttcatgtaaactctagacagaagcattctcagaaactgctttgggatgtttcaattgaagtcccagtgttgaacattccctttcatagagcaggtttgaaacactctttttgtactatctggaagtggacatttggagcgctttcaggtctacggtgaaaaaggagatatcttccaacaaaaactagatagaagcaatgtcagaacttttttcatgatgtatctactcagcaaacagagttgaacctttcttttgagagagcagttttgaaacactctttttgtggaatatgcaagtgggtattaggccagcttggaggatttcgttggaaacgggaatacgtataaaaagcagacagcagcattgtcagaaactactttgtgatgtttgcattcaagtcacagaattgaacactccctttcacagagcaggtttgaaacactctttttgtagtgtctgtaagtgaacatttggattgctttcaggcctaaggtgaaaaaggaaatatcttcccataaaaactagacagaagcattctcagaaacttgtttgtgatgtgtgccctctactgacagagttgaacctttctttgcaaagagcagttttgaaacactctttttgtagaatctgcaagaggatatttggatagctttgaggatttcttgggaaacgggaatgtcttcagataaactctagacagaagcattctcagaaacttctttgggatgtttcaattgaagtcacagtgttgaacattccctttcacagagcaggtttgaaacactctttttgtagtgtctataagtgaacatttggcgtgctttcaggcctaacgttaaaaaggaaatatcttcccataaaaactagacagaagcattctcagaaacttgttcttgatgtgtcccctctactgacagagttgaacctttctttgcaaagagcagctttgaaacactctttttgtagaatctgcaagaggatatttggatagcttggaggatttcgttggaaacgggtatgtcttcagataaactctagacagaagcattctcagaaacttctttgggatgttgcattcaagtcacagagtagaacattcccattcatagagcagatttgaaacactctttttgtagtatctggaagtggacatttgaagcgctttcaggcctatgttgaaaaaggaaatatcttcccataaaaactagacggaagcattctcagaaacttatttgtgatgtgtttgctcaactaacaggattgaaccatcgttttgaaggagcagttttgaaacactgttttcgtggaatctgcaagtggatatttggctagctttgaggatttcgttggaaacgggattacatataaaaaggagacagcagcattctcagaaacttctttgtgatgtctgcattcaattcacagagttgagcattccctttcatagagcaggttggaaacactctttttgtagtatctggatgaggacatttggagcgctttctggcctatggtgaaaaaggaaatatcttcccgtaaaaactagacagaagcattctcagaagtttatttgtgatgtgtgccctcaactaacagagttgaacctttcttttgatagagcagttttgaaacactctttttgtaaaatctgcaagaggatatttggatagctttgaggatttcgttgcaaacgggaatggcttcatataaactctagacagaagcattctcagaaacttcgttgggatgtttcgattgaagtcccagtgttgaacattcccttttatagagcaggttggaaacactctttctgcattccctggaagtggacatttggagcgctttcaggacgacggtgaaaatggaaatatcttccaagcaaaatctagatagaagcaatgtcagaaacttttatgtgatggatctactcagctaacagagttgaacctttcttttgagagagcagttttgcaacactctttttgtggaatatgcaagtggatattagggcagctttgaggatttcgttggaaacgggaatacatgtaaaaagcagacagcagcattctcagaaacttctttgtgatgtttgcattgaagtcacagagttgaacattccctttgagagagcaggtttgaaacacgccttttgtcatatctggaagtgtccattcggagcgcattcaggcttgtgttgaaaaaggaaatatcctcccataaaaactagacagaagcattctcagaaacttatctgtgatgtatgtactcaactaacagaactaaaccatcgttttgaaggagcagttttgaaacactctttttgcggaatctgcaagtggatatttggctagctgggaggatttcgttggaaacgggattacatacaaaaagcagacagcagcattctcagaaacttctttgtgatgtttgcattcaagtcacagagctgaacattccctttcatagagcaggtttgaaacactctttttgtagtatctggatgtggacatttggatcgctttcaggcctatggtgaaaaaggaaatatcttcccatgaaaactagacagaagcattctcagaaacttatttgtgatgtgtgccctcaactgacagtgttgaacctttgttttgatagagcagttctgaaacacactttttgtaaaatctgcaagaggatatttggatagctttgaggatttcgttggaaacgggaatgtcttcatgtaaactctagacagaagcattctcagaaactgctttgggatgtttcaattgaagtcccagtgttgaacattccctttcatagagcaggtttgaaacactctttttgtactatctggaagtggacatttggagcgctttcaggtctacggtgaaaaaggagatatcttccaataaaaactagatagaagcaatgtcagaacttttttcatgatgtatctactcagcaaacagagttgaacctttcttttgagagagcagttttgaaacactctttttgtggaatatgcaagtgggtattaggccagcttggaggatttcgttggaaacgggaatacgtataaaaagcagacagcagcattgtcagaaactactttgtgatgtttgcattcaagtcacagaattgaacactccctttcacagagcaggtttgaaacactctttttgtagtgtctgtaagtgaacatttggattgctttcaggcctaaggtgaaaaaggaaatatcttcccataaaaactagacagaagcattctcagaaacttgtttgtgatgtgtgccctctactgacagagttgaacctttctttgcaaagagcagttttgaaacactctttttgtagaatctgcaagaggatatttggatagctttgaggatttcttgggaaacgggaatgtcttcatgtaaactctggacagaagcattctgagaaacttctttgggatatttcaattgaagtcacagtgttgaacattccctttcacagagcaggtttgaaacactctttttgtagtgtctataagtgaacatttggcgtgctttcaggcctaacgtgaaaaaggaaatatcttcccataaaaacgagacagaagcattctcagaaacttgttcgtgatgtgtgccctctactgacagagttgaacctttctttgcaaagagcagctttgaaacactctttttgtagaatctgcaagaggatatttggatagctttgaggatttcgttggaaacgggtatgtcttcagataaactctagacagaagcattctcagaaacttctttgggatgttgcattcaagtcacagagtagaacattcccattcatagagcagatttgaaacactctttttgtagtatctggaagtggacatttggagcgctttcaggcctatgttgaaaaaggaaatatcttcccataaaaactagacggaagcattctcagaaacttatttgtgatgtgtttgctcaactaacaggattgaaccatcgttttgaaggagcagttttgaaacactgttttcgtggaatctgcaagtggatatttggctagctttgaggatttcgttggaaacgggattacatataaaaaggagacagcagcattctcagaaacttctttgtgatgtctgcattcaattcacagagttgagcattccctttcatagagcaggttggaaacactctttttgtagtatctggatgaggacatttggagcgctttctggcctatggtgaaaaaggaaatatcttcccgtaaaaactagacagaagcattctcagaagtttatttgtgatgtgtgccctcaactaacagagttgaacctttcttttcatagagcagttttgaaacactctttttgtaaaatctgcaagaggatatttggatagctttgaggatttcgttgcaaacgagaatggcttcacataaactctagacagaagcattctcagaaacttcgttgggatgtttcgattgaagtcccagtgttgaacatacccttttatagagcaggttggaaacactctttctgcattccctggaagtggacatttggagcgctttcaggacgacggtgaaaatggaaatatcttccaataaaatctagatagaagcaacgtcagaaacttttatgtgatggatctactcagctaacagagttgaacctttcttttgagagagcagttttgcaacactctttttgtggaatatgcaagtggatattagggcacctttgaggatttcgttggaaacggggaatacatgtaaaaagcagacagcagcattctcagaaacttctttgtgatgtttgcattgaagtcacagagttgaacattccctttgagagagcaggtttgaaacacgccttttgtcatatctggaagtgtccattcggagcgcattcaggcttgtgttgaaaaaggaaatatcctcccagaaaaactagacagaagcattctcagaaacttatttgtgatgtatgtactcaactaacagaactaaaccatcgttttgaaggagcagttttgaaacactctttttgcggaatctgcaagtggatatttggctagcttggaggatttcgttggaaacgggattacatacaaaaagcagagagcagcattctcagaaacttctttgtgatgtttgcattcaagtcacagagttgaacattccctttcatagagcaggtttgaaacactctttttgtagtatctggatgtggacatttggatcgctttcaggcctatggtgaaaaaggaaatatcttcccatgaaaactagacagaagcattctcagaaacttatttgtgatgtgtgccctcaactgacagtgttgaacctttgttttgatagagcagttctgaaacacactttttgtaaaatctgcaagaggatatttggatagctttgaggatttcgttggaaacgggaatgtcttcatgtaaactctagacagaagcattctcagaaactgctttgggatgtttcaattgaagtcccagtgttgaacattccctttcatagagcaggtttgaaacactctttttgtactatctggaagtggacatttggagcgctttcaggtctacggtgaaaaaggagatatcttccaataaaaactagatagaagcaatgtcagaacttttttcatgatgtatctactcagcaaacagagttgaacctttcttttgagagagcagttttgaaacactctttttgtggaatatgcaagtgggtattaggccagcttggaggatttcgttggaaacgggaatacgtataaaaagcagacagcagcattgtcagaaactactttgtgatgtttgcattcaagtcacagaattgaacactccctttcacagagcaggtttgaaacactctttttgtagtgtctgtaagtgaacatttggattgctttcaggcctaaggtgaaaaaggaaatatcttcccataaaaactagacagaagcattctcagaaacttgtttgtgatgtgtgccctctactgacagagttgaacctttctttgcaaagaccagttttgaaacactctttttgtagaatctgcaagaggatatttggatagctttgaggatttacttgggaaacgggaatgtcttcagataaactctagacagaagcattctcagaaacttctttgggatgtttcaattgaagtcacagtgttgaacattccctttcacagagcaggtttgaaacactctttttgtagtgtctataagtgaacatttggcgtgctttcaggcctaacgtgaaaaaggaaatatcttcccataaaaactagacagaagcattctcagaaacttgttcgtgatgtgtgccctctactgacagagttgaacctttctttgcaaagagcagctttgaaacacactttttgtagaatctgcaagaggatatttggatagctttgaggatttcgttggaaacgggtatgtcttcagataaactctagacagaagcattctcagaaacttctttgggatgttgcattcaagtcacagagtagaacattcccattcatagagcagatttgaaacactctttttgtagtatctggaagtggacatttggagcgctttcaggcctatgttgaaaaaggaaatatcttcccataaaaactagacggaagcattctcagaaacttatttgtgatgtgtttgctcaactaacaggactgaaccatcgttttgaaggagcagttttgaaacactgttttcgtggaatctgcaagtggatatttggctagctttgaggatttcgttggaaacgggattacatataaaaaggagacagcagcattctcagaaacttctttgtgatgtctgcattcaattcacagagttgagcattccctttcatagagcaggttggaaacactctttttgtagtatctggatgaggacatttggagcgctttcaggcgtatggtgaaaaaggaaatatcttcccgtaaaaactagacagaagcattctcagaagtttatttgtgatgtgtgccctcaactaacagagttggacctttcttttgatagagcagttttgaaacactctttttgtaaaatctgcaagaggatatttggatagctttgaggatttcgttgcaaacgggaatggcttcatataaactctagacagaagcattctcagaaacttcgttgggatgtttcgattgaagtcccagtgttgaacattcccttttatagagcaggttggaaacactctttctgcattccctggaagtggacatttggagcgctttcaggacgacggtgaaaatggaaatatcttccaagaaaatctagatagaagcaacgtcagaaacttttctgtgatggatctactcagctaacagagttgaacctttcttttgagagagcagttttgcaacactctttttgtggaatatgcaagtggatattagggcagctttgaggatttcgttggaaacgggaatacatgtaaaaagcagacagcagcattctcagaaacttctttgtgatgtttgcattgaagtcacagagttgaacattccctttgagagagcaggtttgaaacacgccttttgtcatatctggaagtgtccattcggagcgcattcaggcttgtgttgaaaaaggaaatatcctcccataaaaactagacagaagcattctcagaaacttatctgtgatgtatgtactcaactaacagaactaaaccatcgttttgaaggagcagttttgaaacactctttttgcggaatctgcaagtggatatttggctagctgggaggatttcgttggaaacgggattacatacaaaaagcagacagcagcattctcagaaacttctttgtgatgtttgcattcaagtcacagagttgaacattccctttcatagagcaggtttgaaacactctttttgtagtatctggatgtggacatttggatcgctttcaggcctatggtgaaaaaggaaatatcttcccatgaaaactagacagaagcattctcagaaacttatttgtgatgtgtgccctcaactgacagtgttgaacctttgttttgatagagcagttctgaaacacactttttgtaaaatctgcaagaggatatttggatagctttgaggatttcgttggaaacgggaatgtcttcatgtaaactctacacagaagcattctcagaaactgctttgggatgtttcaattgaagtcccagtgttgaacattcccattcatagagcaggtttgaaacactctttttgtactatctggaagtggacatttggagcgctttcaggtgtacggtgaaaaaggagatatcttccaataaaaactagatagaagcaatgtcagaacttttttcatgatgtatctactcagcaaacagagttgaacctttcttttgagggagcagttttgaaacactatttttgtggaatatgcaagtgggtattaggccagcttggaggatttcgttggaaacgggaatacgtataaaaagcagacagcagcattgtcagaaactactttgtgatgtttgcattcaagtcacagaattgaacactccctttcacagagcaggtttgaaacactctttttgtagtgtctgtaagtgaacatttggattgctttcaggcctaaggtgaaaaaggaaatatcttcccataaaaactagacagaagcattctcagaaacttgtttgtgatgtgtgccctctactgacagagttgaacctttctttgcaaagagcagttttgaaacactctttttgtagaatctgcaagaggatatttggatagctttgaggatttcttgggaaacgggaatgtcttcagataaactctagacagaagcattctcagaaacttctttgggatgtttcaattgaagtcacagtgttgaacattccctttcacagagcaggtttgaaacactctttttgtagtgtctataagtgaacatttggcgtgctttcaggcctaacgtgaaaaaggaaatatcttcccataaaaactagacagaagcattctcagaaacttgtttgtgatgtgtgccctctactgacagagttgaacctttctttgcaaagagcagctttgaaacactctttttgtagaatctgcaagaggatatgtggatagctttgaggatttcgttggaaacgggtatgtcttcagataaactctagacagaagcattctcagaaacttctttgggatgtttcaattgaagtcacagtgttgaacattccctttcacagagcaggtttgaaacactctttttgtagtgtctataagtgaacatttggcgtgctttcaggcctaacgtgaaaaaggaaatatcttcccataaaaactagacagaagcattctcagaaacttgttcgtgatgtgtgccctctactgacagagttgaacctttctttgcaaagagcagctttgaaacactctttttgtagaatctgcaagaggatatttggatagctttgaggatttcgttggaaacgggtatgtcttcagataaactctagacagaagcattctcagaaacttctttgggatgttgcattcaagtcacagagtagaacattcccattcatagagcagatttgaaacactctttttgtagtatctggaagtggacatttggagcgctttcaggcctatgttgaaaaaggaaatatcttcccataaaaactagacggaagcattctcagaaacttacttgtgatgtgtttgctcaactaacaggattgaaccatcgttttgaaggagcagttttgaaacacagttttcgtggaatctgcaagtggatatttggctagctttgaggatttcgttggaaacgggattacatataaaaaggagacagcagcattctcagaaacttctttgtgatgtttgcattcaagtcacagagttgaacattccctttcatagagcaggtttgaaacactctttttgtagtatctggatgtggacatttggatcgctttcaggcctatggtgaaaaaggaaatatcttcccatgaaaactagacagaagcattctcagaaacttatttgtgatgtgtgccctcaactgacaagtgttgaacctttgttttgatagagcagttctgaaacacactttttgtaaaatctgcaagaggatatttggatagctttgaggatttcgttggaaacgggaatgtcttcatgtaaactctagacagaagcattctcagaaactgctttgggatgtttcaattgaagtcccagtgttgaacattcccattcatagagcaggtttgaaacactctttttgtactatctggaagtggacatttggagcgctttcaggtctacggtgaaaaaggagatatcttccaataaaaactagatagaagcaatgtcagaacttttttcatgatgtatctactcagcacacagagttgaacctttcttttgagagagcagttttgaaacactctttttgtggaatatgcaagtgggtattaggccagcttggaggatttcgttggaaacgggaatacgtataaaaagcagacagcagcattgtcagaaactactttgtgatgtttgcattcaagtcacagaattgaacactccctttcacagagcaggtttgaaacactctttttgtagtgtctgtaagtgaacatatggattgctttcaggcctaaggtgaaaaaggaaatatcttcccataaaaactagacagaagcattctcagaaacttgtttgtgatgtgtgccctctactgacagagttgaacctttctttgcaaagagcagttttgaaacactctttttgtagaatctgcaagaggatatttggatagctttgaagatttcttgggaaacgggaatgtcttcagataaactctagacagaagcattctcagaaacttctttgggatatttcaattgaagtcacagtgttgaacattccctttcacagagcaggtttgaaacactctttttgtagtgtgtataagtgaacatttcgcgtgctttcaggcctaacgtgaaaaaggaaatatcttcccataaaaactagacagaagcattctcagaaacttgttcatgatgtgtgccctctactgacagagttgaacctttctttgcaaagagcagctttgaaacactctttttgtagaatctgcaagaggatatttggatagcttggaggatttcgttggaaacgggtatgtcttcagataaactctagacagaaacattctcagaaacttctttgggatgttgcattcaagtcacagagtagaacattcccatgcatagagcagatttgaaacactctttttgtagtatctggaagtggacatttggagcgctttcaggcctatgttgaaaaaggaaatatcttcccataaaaactagacgggaagcattctcagaaacttacttgtgatgtgtttgctcaactaacaggattgaaccatcgttttgaaggagcagttttgaaacacagttttcgtggaatctgcaagtggatatttggctagctttgaggatttcgttggaaacgggattacatataaaaaggagacagcagcattctcagaaacttctttgtgatgtctgcattcaattcacagagttgagcattccctttcatagagcaggttggaaacactctttttgtagtatctggatgaggacatttggagcgctttcaggcgtatggtgaaaaaggaaatatcttcccgtaaaaactagacagaagcattctcagaagtttatttgagatgtgtgccctcaactaacagagttgaaactttcttttgatagagcagttttgaaacactctttttgtaaaatctgcaagaggatatttggatagctttgaggatttcgttgcaaacgggaatggcttcatataaactctagacagaagcattctcagaaacttcgttgggatgttgcgattgaagtcccagtgttgaacattcccttttatagagcaggttggaaacactctttctgcattccctggaagtggacatttggagcgctttcaggacgacggtgaaaatggaaatatcttccaataaaatctagatagaagcaatgtcagaaacttttctgtgatggatctactcagctaacagagttgaacctttcttttgagagagcagttttgcaacactctttttgtggaatatgcaagtggatattagggcagctttgaggatttcgttggaaacgggaatacatgtaaaaagcagacagcagcattctcagaaacttctttgtgatgtttgcattgaagtcacagagttgaacattccctttgagagagcaggtttgaaacacgccttttgtcatatctggaagtgtccattcggagcgcattcaggcttgttttgaaaaaggaaatatcctcccagaaaactagacagaagcattctcagaaacttatctgtgatgtatgtactcaactaacagaactaaaccatcgttttgaaggagcagttttgaaacactctttttgcggaatctgcaagtggatatttggctagctgggaggatttcgttggaaacgggattacatacaaaaagcagacagcagcattctcagaaacttctttgtgatttttgcattcaagtcacagagttgaacattccctttcatagagcaggttggaaacactctttttgtagtatctggatgtggacatttggatcgctttcaggcctatggtgaaaaaggaaatatcttcccatgaaaactagacagaagcattctcagaaacttatttgtgatgtgtgccctcaactgacagtgttgaacctttgttttgatagagcagttctgaaacacactttttgtaaaatctgcaagaggatatttggatagctttgaggatttcgttggaaacgggaatgtcttcatgtaaacttctagacagaagcattctcagaaactgctttgggatgtttcaattgaagtcccagtgttgaacattcccattcatagagcaggtttgaaacactctttttgtactatctggaagtggacatttggagcgctttcaggtctacggtgaaaaaggagatatcttccaataaaaactagatagaagcaatgtcagaacttttttcatgatgtatctactcagcaaacagagttgaacctttcttttgagagagcagttttgaaacactctttttgtggaatatgaaagtgggtattaggccagcttggaggatttcgttggaaacgggaatacgtataaaaagcagacagcagcattgtcagaaactactttgtgatgtttgcattcaagtcacagaactgaacactccctttcacagagcaggtttgaaacactctttttgtagtgtctgtaagtgaacatttggattgctttcaggcctaaggtgaaaaaggaaatatcttcccataaaaactagacagaagcattctcagaaacttgtttgtgatgtgtgccctctactgacagagttgaacctttctttgcaaagagcagttttgaaacactctttttgtagaatctgcaagaggatatttggatagctttgaggatttcttgggaaacgggaatgtcttcagataaactctagacagaagcattctcagaaacttctttgggatgtttcaattgaagtcacagtgttgaacattccctctcacagagcaggtttgaaacactctttttgtagtgtctataattgaacatttggcgtgctttcaggcctaacgtgaaaaaggaaatatcttcccataaaaactagacagaagcattctcagaaacttgttcgtgatgtgtgccctctactgacagagttgaacctttctttgcaaagagcagctttgaaacactctttttgtagaatctgcaagaggatatgtggatagctttgaggatttcgttggaaacgggtatgtcttcagataaactctagacagaagcattctcagaaacttctttgggatgtttcaattgaagtcacagtgttgaacattccctttcacagagcaggtttgaaacactctttttgtagtgtctataagtgaacatttggcgtgctttcaggcctaacgtgaaaaaggaaatatcttcccataaaagctagacagaagcattctcagaaacttgttcatgatgtgtgccctctactgacagagttgaacctttttttgcaaagagcagctttgaaacactctttttgtagaatctgcaagaggatatttggatagcttggaggatttcgttggaaacgggtatgtcttcagataaactctagacagaagcattctcagaaacttctttgggatgttgcattcaagtcacagagtagaacattcccattcatagagcagatttgaaacactctttttgtagtatctggaagtggacatttggagcgctttcaggcctatgttgaaaaaggaaatatcttcccataaaaactagacggaagcattctcagaaacttacttgtgatgtgtttgctcaactaacagaattgaaccatcgttttgaaggagcagttttgaaacactgttttcgtggaatctgcaagtggatatttggatagctttgaggatttcgttggaaacgggattacatataaaaaggagacagcagcattctcagaaacttctttgtgatgtctgcattcaattcacagagttgagcattccctttcatagagcaggttggaaacactctttgtgtagtatctggatgaggacatttggagcgctttcaggcctatggtgaaaaaggaaatatcttcccgtaaaaactagacagaagcattcccagaaatttatttgtgatgggtgccctcaactaacagagttgaacctttcttttgatagagcagttttgaaacactctttttgtaaaatctgcaagaggatatttggatagctttgaggatttcattgcaaacgggaatggcttcatataaactctagacagaagcattctcagaaacttcgttgggatgtttcgattgaagtcccagtgttgaacattcccttttatagagcaggttggaaacactctttctgcattccctggaagtggacatttggagcgctttcaggacgacggtgaaaatggaaatatcttccaagaaaatctagatagaagcaacgtcagaaacttttatgtgatggatctactcagctaacagagttgaacctttcttttgagagagcagttttgcaacactctttttgtggaatatgcaagtggatattagggcagctttgaggatttcgttggaaacgggaatacatgtaaaaagcagacagcagcattctcagaaacttctttgtgatgtttgcattgaagtcacagagttgaacattccctttgagagagcaggtttgaaacacgccttttgtcatatctggaagtgtccattcggagcgcattcaggcttgtgttgaaaaaggaaatatcctcccataaaaactagacagaagcattctcagaaacttatctgtgatgtatgtactcaactaacagaactaaaccatcgttttgaaggagcagttttgaaacactctttttgcggaatctgcaagtggatatttggctagctgggaggatttcgttggaaacgggattacatacaaaaagcagacagcagcattctcagaaacttctttgtgatgtttgcattcaagtcacagagttgaacattccctttcatagagcaggtttgaaacactctttttgtagtatctggatgtggacatttggatcgctttcaggcctatggtgaaaaaggaaatatcttcccatgaaaactagacagaagcattctcagaaacttatttgtgatgtgtgccctcaactgacagtgttgaacctttgttttgatagagcagttctgaaacacactttttgtaaaatctgcaagaggatatttggatagctttgaggatttcgttggaaacggggaatgtcttcatgtaaactctagacagaagcattctcagaaactgctttgggatgtttcaattgaagtcccagtgttgaacattccctttcatagagcaggtttgaaacactctttttgtagtatctggaagtggacatttggagcgctttcaggtctacggtgaaaaaggagatatcttccaataaaaactagatagaagcaatgtcagaacttttttcatgatgtatctactcagcaaacagagttgaacctttcttttgagagagcagttttgaaacactctttttgtggaatatgcaagtgggtattaggccagcttggaggatttcgttggaaacgggaatacgtataaaaagcagacagcagcattgtcagaaactactttgtgatgtttgcattcaagtcacagaattgaacactccctttcacagagcaggtttgaaacactctttttgtagtgtctgtaagtgaacatttggattgctttcaggcctaaggtgaaaaaggaaatatcttcccataaaaactagacagaagcattctcagaaacttgtttgtgatgtgtgccctctactgacagagttgaacctttctttgcaaagagcagttttgaaacactctttttgtagaatctgcaagaggatatttggatagctttgaggatttcttgggaaacgggaatgtcttcagataaactctagacagaagcattctcagaaacttctttgggatgtttcaattgaagtcacagtgttgaacattccctttcacagagcaggtttgaaacactctttttgtagtgtctgtaagtgaacatttggattgctttcaggcctaaggtgaaaaaggaaatatcttcccataaaaactagacagaagcattctcagaaacttgtttgtgatgtgtgccctctactgacagagctgaacctttctttgcaaagagcagttttgaaacactctttttgtagaatctgcaagaggatatttggatagctttgaggatttcttgggaaacgggaatgtcttcagataaactctagacggaagcattctcagaaacttctttgggatgtttcaattgaagtcacagtgttgaacattccctttcacagagcaggtttgaaacactctttttgtagtgtctataagtgaacatttggcgtgctttcaggcgtaacgtgaaaaaggaaatatcttcccataaaaactagacagaagcgttctcagaaacttgttcttgatgtgtgccctctactgacagagttgaacctttctttgcaaagagcagctttgaaacactctttttgtagaatctgcaagaggatatttggatagctttgaggatttcgttggaaacgggtatgtcttcagataaactctagacagaagcattctcagaaacttctttgggatgttgcattcaagtcacagagtagaacattcccattcatagagcagatttgaaacactctttttgtagtatctggaagtggacatttggagcgctttcaggcctatgttgaaaaaggaaatatcttcccatgaaaactagacagaagcattctcagaaacttatttgtgatgtgtttgctcaactaacaggattgaaccatcgttttgaaggagcagttttgaaacactgttttcgtggaatctgcaagtggatatttggctagctttgaggatttcgttggaaacgggattacatataaaaaggagacagcagcattctcagaaacttctttgtgatgtctgcattcaattcacagagttgagcattccttttcatagagcaggttggaaacactctttttgtagtatctggatgaggacatttggagcgctttcaggcgtatggtgaaaaaggaaatatcttcccgtaaaaactagacagaagcattctcagaagtttatttgagatgtgtgccctcaactaacagagttgaacctttcttttgatagagcagttttgaaacactctttttgtaaaatctgcaagaggatatttggatagctttgaggatttcgttgcaaacgggaatggcttcatataaactctagacagaagcattctcagaaacttcgttgggatgttttgattgaagtcccagtgttgaacattcccttttatagagcaggttggaaacactctttctgcattccctggaagtggacatttggagcgctttcaggacgacggtgaaaatggaaatatcttccaagaaaatctagatagaagcaatgtcagaaacttttctgtgatggatctactcagctaacagagttgaacctttcttttgagagagcagttttgcaacactctttttgtggaatatgcaagtggatattagggcagctttgaggatttcgttggaaacgggaatacatgtaaaaagcagacagcagcattctcagaaacttctttgtgatgtttgcattgaagtcacagagttgaacattccctttgagagagcaggtttgaaacacgccttttgtcatatctggaagtgtccattcggagcgcattcaggcttgtgttgaaaaaggaaatatcctcccataaaaactagacagaagcattctcagaaacttatttgtgatgtatgtactcaactaacagaactaaaccatcgttttgaaggagcagttttgaaacactctttttgcggaatctgcaagtggatatttggctagcttgggggatttcgttggaaacgggattacatacaaaaagcagacagcagcattctcagaaacttctttgtgatgtttacattcaagtcacagagttgaacattccctttcatagagcaggtttgaaaccctctttttgtagtatctggatgtggacatttggatcgctttcaggcctatggtgaaaaaggaaatatcttcccatgaaaactagacagaagcattctcagaagtttatttgtgatgtgtgccctcaactaacagagttgaacctttcttttgatagagcagttttgaaacactctttttgtaaaatctgcaagaggatatttggatagctttgaggatttcgttgcaaacgggaatggcttcatataaactctagacagaagcattctcagaaacttcgttgggatgtttcgattgaagtcccagtgttgaacattcccttttatagagcaggttggaaacactctttctgcattccctggaagtggacatttggagcgctttctggacgacggtgaaaatggaaatatcttccaagaaaatctagatagaagcaatgtcagaaacttttatgtgatggatctactcagctaacagagttgaacctttcttttgagagagcagttttgcaacactctttttgtggaatatgcaagtggatattagggcagctttgaggatttcgttggaaacgggaatacatgtaaaaagcagacagcagcattctcagaaacttctttgtgatgtttgcattgaagtcacagagttgaacattccctttgagagagcaggtttgaaacacgccttttgtcatatctggaagtgtccattcggagcgcattcaggcttgtgttgaaaaaggaaatatcctcccataaaaactagacagaagcattctcagaaacttatttgtgatgtatgtactcaactaacagaactaaaccatcgttttgaaggagcagttttgaaacactctttttgcggaatctgcaagtggatatttggctagctgggaggatttcgttggaaacgggattacatacaaaaagcagacagcagcattctcagaaacttctttgtgatgtttgcattcaagtcacagagttgaacattccctttcatagagcaggtttgaaacactctttttgtagtatctggatgtggacatttggatcgctttcaggcctatggtgaaaaaggaaatatcttcccatgaaaactagacagaagcattctcagaaacttatttgtgatgtgtgccctcaactgacagtgttgaacctttgttttgatagagcagttctgaaacacactttttgtaaaatctgcaagaggatatttggatagctttgaggatttcgttggaaacgggaatgtcttcatgtaaactctagacagaagcattctcagaaactgctttgggatgtttcaattgaagtcccagtgttgaacattccctttcatagagcaggtttgaaacactctttttgtactatctggaagtggacatttggagcgctttcaggtctacggtgaaaaaggagatatcttccaataacaactagatagaagcaatgtcagaacttttttcgtgatgtatctactcagcaaacagagttgaacctttcttttgagagagcagttttgaaacactctttttgtggaatatgcaagtgggtattaggccagcttggaggatttcgttggaaacgggaatacgtataaaaagcagacagcagcattgtcagaaactactttgtgatgtttgcattcaagtcacagaattgaacactccctttcacagagcaggtttgaaacactctttttgtagtgtctgtaagtgaacatatggattgctttcaggcctaaggtgaaaaaggaaatatcttcccataaaaactagacagaagcattctcagaaacttgtttgtgatgtgtgccctctactgacagagttgaacctttctttgcaaagaccagttttgaaacactctttttgtagaatctgcaagaggatatttggatagctttgaggatttcttgggaaacgggaatgtcttcagataaactctagacagaagcattctgagaaacttctttgggatatttcaattgaagtcacagtgttgaacattccctttcacagagcaggtttgaaacactctttttgtagtgtctataagtgaacatttggcgtgctttcaggcctaacgtgaaaaaggaaatatcttcccataaaaacgagacagaagcattctcagaaacttgttcgtgatgtgtgccctctactgacagagttgaacctttctttgcaaagagcagctttgaaacactctttttgtagaatctgcaagaggatatttggatagctttgaggatttcgttggaaacgggtatgtcttcagataaactctagacagaagcattctcagaaacttctttgagatgttgcattcaagtcacagagtagaacattcccattcatagagcagatttgaaacactctttttgtagtatctggaagtggacatttggagcgctttcaggcctatgttgaaaaaggaaatatcttcccataaaaactagacggaagcattctcagaaacttacttgtgatgtgtttgctcaactaacagaattgaaccatcgttttgaaggagcagttttgaaacactgttttcgtggaatctgcaagtggatatttggctagctttgaggatttcgttggaaacgggattacatataaaaaggagacagcagcattctcagaaacttctttgtgatgtctgcattcaagtcacagagttgagcattccctttcatagagcaggttggaaacactctttttgtagtatctggatgaggacatttggagcgctttcaggcgtatggtgaaaaaggaaatatcttcccgtaaaaactagacagaagcattctcagaaatttatttgtgatgtgtgccctcaactaacagagttgaacctttcttttgatagagcagttttgaaacactctttttgtaaaatctgcaagaggatatttggatagctttgaggatttcgttgcaaacgggaatggcttcatataaactctagacagaagcattctcagaaacttcgttgggatgtttcgattgaagtcccagtgttgaacattcccttttatagagcaggttggaaacactctttctgcattccctggaagtggacatttggagcgctttcaggacgacggtgaaaatggaaatatcttccaagaaaatctagatagaagcaacgtcagaaacttttctgtgatggatctactcagctaacagagttgaacctttcttttgagagagcagttttgcaacactctttttgtggaatatgcaagtggatattagggcagctttgaggatttcgttggaaacgggaatacatgtaaaaagcagacagcagcattctcagaaacttctttgtgatgtttgcattgaagtcacagagttgaacattccctttgagagagcaggtttgaaacacgccttttgtcatatctggaagtgtccattcggagcgcattcaggcttgtgttgaaaaaggaaatatcctcccataaaaactagacagaagcattctcagaaacttatctgtgatgtatgtactcaactaacagaactaaaccatcgttttgaaggagcagttttgaaacactctttttgcggaatctgcaagtggatatttggctagctgggaggatttcgttggaaacgggattacatacaaaaagcagacagcagcattctcagaaacttctttgtgatgtttgcattcaagtcacagagttgaacattccctttcatagagcaggtttgaaacactctttttgtagtatctggatgtggacatttggatcgctttcaggcctatggtgaaaaaggaaatatcttcccatgaaaactagacagaagcattctcagaaacttatttgtgatgtgtgccctcaactgacagtgttgaacctttgttttgatagagcagttctgaaacacactttttgtaaaatctgcaagaggatatttggatagctttgaggatttcgttggaaacgggaatgtcttcatgtaaactctacacagaagcattctcagaaactgctttgggatgtttcaattgaagtcccagtgttgaacattcccattcatagagcaggtttgaaacactctttttgtactatctggaagtggacatttggagcgctttcaggtctacggtgaaaaaggagatatctttcaataaaaactagatagaagcaatgtcagaacttttttcatgatgtatctactcagcaaacagagttgaacctttcttttgagagagcagttttgaaacactctttttgtggaatatgcaagtgggtattaggccagcttggaggatttcgttggaaacgggaatacgtataaaaagcagacagcagcattgtcagaaactactttgtgatgtttgcattcaagtcacagaattgaacactccctttcacagagcaggtttgaaacactctttttgtagtgtctgtaagtgaacatttggattgctttcaggcctaaggtgaaaaaggaaatatcttcccataaaaactagacagaagcattctcagaaacttgtttgtgatgtgtgccctctactgacagagttgaacctttctttgcaaagagcagttttgaaacactctttttgtagaatctgcaagaggatatttggatagctttgaggatttcttgggaaacgggaatgtcttcagataaactctagacagaagcattctcagaaacttctttgggatgtttcaattgaagtcacagtgttgaacattccctttcacagagcaggtttgaaacactctttttgtagtgtctataagtgaacatttggcgtgctttcaggcctaacgtgaaaaaggaaatatcttcccataaaaactagacagaagcattctcagaaacttgtttgtgatgtgtgccctctactgacagagttgaacctttctttgcaaagagcagctttgaaacactctttttgtagaatctgcaagaggatatgtggatagctttgaggatttcgttggaaacgggtatgtcttcagataaactctagacagaagcattctcagaaacttctttgggatgtttcaattgaagtcacagtgttgaacattccctttcacagagcaggtttgaaacactctttttgtagtgtctataagtgaacatttggcgtgctttcaggcctaacgtgaaaaaggaaatatcttcccataaaaactagacagaagcattctcagaaacttgttcatgatgtgtgccctctactgacagagttgaacctttctttgcaaagagcagctttgaaacactctttttgtagaatctgcaagaggatatttggatagctttgaggatttcgttggaaacgggtatgtcttcagataaactctagacagaagcattctcagaaacttctttgggatgttgcattcaagtcacagagtagaacattcccattcatagagcagatttgaaacactctttttgtagtatctggaagtggacatttggagcgctttcaggcctatgttgaaaaaggaaatatcttcccataaaaactagacggaagcattctcagaaacttacttgtgatgtgtttgctcaactaacagaattgaaccatcgttttgaaggagcagttttgaaacactgttttcgtggaatctgcaagtggatatttggctagctttgaggatttcgttggaaacgggattacatataaaaaggagacagcagcattctcagaaacttctttgtgatgtctgcattcaagtcacagagttgagcattccctttcatagagcaggttggaaacactctttttgtagtatctggatgaggacatttggagcgctttcaggcgtatggtgaaaaaggaaatatcttcccgtaaaaactagacagaagcattctcagaaatttatttgtgatgtgtgccctcaactaacagagttgaacctttcttttgatagagcagttttgaaacactctttttgtaaaatctgcaagaggatatttggatagctttgaggatttcgttgcaaacgggaatggcttcatataaactctagacagaagcattctcagaaacttcgttgggatgtttcgattgaagtcccagtgttgaacattcccttttatagagcaggttggaaacactctttctgcattccctggaagtggacatttggagcgctttcaggacgacggtgaaaatggaaatatcttccaagaaaatctagatagaagcaatgtcagaaacttttatgtgatggatctactcagctaacagagttgaacctttcttttgagagagcagttttgcaacattctttttgtggaatatgcaagtggatattagggcagctttgaggatttcgttggaaacgggaatacatgtaaaaagcagacagcagcattctcagaaacttctttgtgatgtttgcattgaagtcacagagttgaacattccctttgagagagcaggttggaaacacgccttttgtcatatctggaagtgtccattcggagcgcattcaggcttgtgttgaaaaaggaaatatcctcccataaaaactagacagaagcattctcagaaacttatctgtgatgtatttactcaactaacagaactaaaccatcgttttgaaggagcagttttgaaacactctttttgcggaatctgcaagtggatatttggctagctgggaggatttcgttggaaacgggattacatacaaaaagcagacagcagcattctcagaaacttctttgtgatgtttgcattcaagtcacagagttgaacattccctttcatagagcaggtttgaaacactctttttgtagtatctggatgtggacatttggatcgctttcaggcctatggtgaaaaaggaaatatcttcccatgaaaactagacagaagcattctcagaaacttatttgtgatgtgtgccctcaactgacagtgttgaacctttgttttgatagagcagttctgaaacacactttttgtaaaatctgcaagaggatatttggatagctttgaggatttcgttggaaacgggaatgtcttcatgtaaactctagacagaagcattctcagaaactgctttgggatgtttcaattgaagtcccagtgttgaacattccctttcatagagcaggtttgaaacactctttttgtactatctggaagtggacatttggagcgctttcaggtctacggtgaaaaaggagatatcttccaataaaaactagatagaagcaatgtcagaacttttttcatgatgtatctactcagcaaacagagttgaacctttcttttgagagagcagttttgaaacactctttttgtggaatatgcaagtgggtattaggccagcttggaggatttcgttggaaacgggaatacgtataaaaagcagacagcagcattgtcagaaactactttgtgatgttggcattcaagtcacagaattgaacactccctttcacagagcaggtttgaaacactctttttgtagtgtctgtaagtgaacatttggattgctttcaggcctaaggtgaaaaaggaaatatcttcccataaaaactagacagaagcattctcagaaacttgtttgtgatgtgtgccctctactgacagagttgaacctttctttgcaaagagcagttttgaaacactctttttgtagaatctgcaagaggatatttggatagctttgaggatttcttgggaaacgggaatgtcttcagataaactctagacagaagcattctcagaaacttctttgggatgtttcaattgaagtcacagtgttgaacattccctttcacagagcaggtttgaaacactctttttgtagtgtctataagtgaacatttggcgtgctttcaggcgtaacgtgaaaaaggaaatatcttcccataaaaaccagacagaagcattctcagaaacttgtttgtgatgtgtgccctctactgacagagttgaacctttctttgcaaagagcagctttgaaacactctttttgtagaatctgcaagaggatatgtggatagctttgaggatttcgttggaaacgggtatgtcttcagataaactctagacagaagcattctcagaaacttctttgggatgttgcattcaagtcacagagtagaacattcccattcatagagcagatttgaaacactctttttgtagtatctggaagtggacatttggagcgctttcaggcctatgttgaaaaaggaaatatcttcccataaaaactagacggaagcattctcagaaacttatttgtgatgtgtttgctcaactaacagaattgaaccatcgttttgaaggagcagttttgaaacactgttttcgtggaatctgcaagtggatatttggctagctttgaggatttcgttggaaacgggattacatataaaaaggagacagcaacattctcagaaacttctttgtgatgtctgcattcaagtcacagagttgagcattccctttcatagagcaggttggaaacactctttttgtagtatctggatgaggacatttggagcgctttcaggcgtatggtgaaaaaggaaatatcttcccgtaaaaactagacagaagcattctcagaaatttatttgtgatgtgtgcctcaactaacagagttgaacctttcttttgatagagcagttttgaaacactctttttgtaaaatctgcaagaggatatttggatagctttgaggatttcgttgcaaacgggaatggcttcatataaactctagacagaagcattctcagaaacttcgttgggatgtttcgattgaagtcccagtgttgaacattcccttttatagagcaggttggaaacactctttctgcattccctggaagtggacatttggagcgctttcaggacgacggtgaaaatggaaatatcttccaagaaaatctagatagaagcaacgtcagaaacttttctgtgatggatctactcagctaacagagttgaacctttcttttgagagagcagttttgcaacactctttttgtggaatatgcaagtggatattagggcagctttgaggatttcgttggaaacgggaatacatgtaaaaagcagacagcagcattctcagaaacttctttgtgatgtttgcattgaagtcacagagttgaacattccctttgagagagcaggtttgaaacacgccttttgtcatatctggaagtgtccattcggagcgcattcaggcttgtgttgaaaaaggaaatatcctcccataaaaactagacagaagcattctcagaaacttatctgtgatgtatgtactcaactaacagaactaaaccatcgttttgaaggagcagttttgaaacactctttttgcggaatctgcaagtggatatttggctagctgggaggatttcgttggaaacgggattacatacaaaaagcagacagcagcattctcagaaacttctttgtgatgtttgcattcaagtcacagagttgaacattccctttcatagagcaggtttgaaacactctttttgtagtatctggatgtggacatttggatcgctttcaggcctatggtgaaaaaggaaatatcttcccatgaaaactagacagaagcattctcagaaacttatttgtgatgtgtgccctcaactgacagtgttgaacctttgttttgatagagcagttctgaaacacactttttgtaaaatctgcaagaggatatttggatagctttgaggatttcgttggaaacgggaatgtcttcatgtaaactctacacagaagcattctcagaaactgctttgggatgtttcaattgaagtcccagtgttgaacattcccattcatagagcaggtttgaaacactctttttgtactatctggaagtggacatttggagcgctttcaggtctacggtgaaaaaggagatatcttccaataaaaactagatagaagcaatgtcagaacttttttcatgatgtatctactcagcaaacagagttgaacctttcttttgagagagcagttttgaaacactccttttgtggaatatgcaagtgggtattaggccagcttggaggatttcgttggaaacgggaatacgtataaaaagcagacagcagcattgtcagcaaactactttgtgatgtttgcattcaagtcacagaattgaacactccctttcacagagcaggtttgaaacactctttttgtagtgtctgtaagtgaacatttggattgatttcaggcctaaggtgaaaaaggaaatatcttcccataaaaactagacagaagcattctcagaaacttgtttgtgatgtgtgccctctactgacagagttgaacctttctttgcaaagagcagttttgaaacactctttttgtagaatctgcaagaggatatttggatagctttgaggatttcttgggaaacgggaatgtcttcagataaactctagacagaagcattttcagaaacttctttgggatgtttcaattgaagtcacagtgttgaacattccctttcacagagcaggtttgaaacactctttttgtagtgtctataagtgaacatttggcgtgctttcaggcctaacgtgaaaaaggaaatatcttcccataaaaactagacagaagcattctcagaaacttgttcttgatgtgtcccctctactgacagagttgaacctttctttgcaaagagcagctttgaaacactctttttgtagaatctgcaagaggatatttggatagcttggaggatttcgttggaaacgggtatgtcttcagataaactctagacagaagcattctcagaaacttctttgggatgctgcattcaagtcacagagtagaacattcccattcatagagcagatttgaaacactctttttgtagtatctggaagtggacatttggagcgctttcaggcctatgttgaaaaaggaaatatcttccaataaaaactagacggaagcattctcagaaacttaattgtgatgtgtttgctcaactaacaggattgaaccatcgttttgaaggagcagttttgaaacactgttttcgtggaatctgcaagtggatatttggctagctttgaggatttcgttggaaacgggattacatataaaaaggagacagcagcattctcagaaacttctttgtgatgtctgcattcaattcacagagttgagcattccctttcatagagcaggttggaaacactctttttgtagtatctggatgaggacatttggagcgctttcaggcgtatggtgaaaagggaaatatcttcccgtaaaaactagacagaagcattctcagaagtttatttgtgatgtgtgccctcaactaacagagttgaacctttcttttgatagagcagttttgaaacactctttttgtaaaatctgcaagaggatatttggatagctttgaggatttcgttgcaaacgggaatggcttcatataaactcctagacagaagcattctcagaaacttcgttgggatgtttcgattgaagtcccagtgttgaacattcccttttatagagcaggttggaaacactctttctgcattccctggaagtggacatttggagcgctttcaggacgacggtgaaaatggaaatatcttccaagaaaatctagatagaagcaatgtcagaaacttttctgtgatggatctactcagctaacagagttgaaactttcttttgagagagcagttttgcaacactctttttgtggaatatgcaagtggatattagggcagctttgaggatttcgttggaaacgggaatacatgtaaaaagcagacagcagcattctcagaaacttctttgtgatgtttgcattgaagtcacagagttgaacattccctttgagagagcaggtttgaaacacgccttttgtcatatctggaagtgtccattcggagcgcattcaggcttgtgttgaaaaaggaaatatcctcccataaaaactagacagaagcattctcagaaacttatctgtgatgtatgtactcaactaacagaactaaaccatcgttttgaaggagcagttttgaaacactctttttgcggaatctgcaagtggatatttggctagctgggaggatttcgttggaaacgggattacatacaaaaagcagacagcagcattctcagaaacttctttgtgatgtttgcattcaagtcacagagttgaacattccctttcatagagcaggtttgaaacactctttttgtagtatctggatgtggacatttggatcgctttcaggcctatggtgaaaaaggaaatatcttcccatgaaaactagacagaagcattctcagaaacttatttgtgatgtgtgccctcaactgacagtgttgaacctttgttttgatagagcagttctgaaacacactttttgtaaaatctgcaagaggatatttggatagctttgaggatttcgttggaaacgggaatgtcttcatgtaaactctagacagaagcattctcagaaactgctttgggatgtttcaattgaagtcccagtgttgaacattccctttcatagagcaggtttgaaacactctttttgtactatctggaagtggacatttggagcgctttcaggtctacggtgaaaaaggagatatcttccaataaaaactagatagaagcaatgtcagaacttttttcatgatgtatctactcagcaaacagagttgaacctttcttttgagagagcagttttgaaacactctttttgtggaatatgaaagtgggtattaggccagcttggaggatttcgttggaaacgggaatacgtataaaaagcagacagcagcattgtcagaaactactttgtgatgtttgcattcaagtcacagaactgaacactccctttcacagagcaggtttgaaacactctttttgtagtgtctgtaagtgaacatttggattgctttcaggcctaaggtgaaaaaggaaatatcttcccataaaaactagacagaagcattctcagaaacttgtttgtgatgtgtgccctctactgacagagttgaacctttctttgcaaagagcagttttgaaacactctttttgtagaatctgcaagaggatatttggatagctttgaggatttcttgggaaacgggaatgtcttcagataaactctagacagaagcattctcagaaacttctttgggatatttcaattgaagtcacagtgttgaacattccctttcacagagcacgtttgaaacactctttttgtagtgtctataagtgaacatttggcgtgctttcaggcctaacgtgaaaaaggaaatatcttcccataaaaactagacagaagcattctcagaaacttgttcgtgatgtgtgccctctactgacagagttgaacctttctttgcaaagagcagctttgaaacacactttttgtagaatctgcaagaggatatttggatagcttggaggatttcgttggaaacgggtatgtcttcagataaactctagacagaagcattctcagaaatttctttgggatgttgcatgcaagtcacagagtagaacattcccattcatagagcagatttgaaacactctttttgtagtatctggaagtggacatttggagcgctttcaggcctatgttgaaaaaggaaatatcttcccataaaaactagacggaagcattctcagaaacttatttgtgatgtgtttgctcaactaacaggattgaaccatcgttttgaaggagcagttttgaaacactgttttcgtggaatctgcaagtggatatttggctagctttgaggatttcgttggaaacgggattacatataaaaaggagacagcagcattctcagaaacttctttgtgatgtctgcattcaattcacagagttgagcattccctttcatagagcaggttggaaacactctttttgtagtatctggatgaggacatttggagcgctttcaggcctatggtgaaaaaggaaatatcttcccgtaaaaactagacagaagcattctcagaaatttatttgtgatgtgtgccctcaactaacagagttgaacctttcttttgatagagcagttttgaaacactctttttgtaaaatctgcaagaggatatttggatagcttgaggatttcgttgcaaacgggaatggcttcatataaactctagacagaagcattctcagaaacttcgttgggatgtttcgattgaagtcccagtgttgaacattcccttttatagagcaggttggaaacactctttctgcattccctggaagtggacatttggagggctttcaggacgacggtgaaaatggaaatatcttccaagaaaatctagatagaagcaacgtcagaaacttttatgtgatggatctactcagctaacagagttgaacctttcttttgagagagcagttttgcaacactctttttgtggaatatgcaagtggatattagggcagctttgaggatttcgttggaaacgggaatacatgtaaaaagcagacagcagcattctcagaaacttctttgtgatgtttgcattgaagtcacagagttgaacattccctttgagagagcaggtttgaaacacgccttttgtcatatctggaagtgtccattcggagcgcattcaggcttgtgttgaaaaaggaaatatcctcccataaaaactagacagaagcattctcagaaacttatttgtgatgtatgtactcaactaacagaactaaaccatcgttttgaaggagcagttttgaaacactctttttgcggaatctgcaagtggatatttggctagctgggaggattttgttggaaacgggattacatataaaaaggagacagcagcattctcagaaacttctttgtgatgtctgcattcaattcacagagttgagcattccctttcatagagcaggttggaaactctctttttgtagtatctggatgaggacttttgtagcgctttcaggcgtatggtgaaaaaggaaatatcttcccgtaaaaactagacagaagcattctcagaaatttatttgtgatgtgtgccctcaactaacagagttgaacctttcttttgatagagcagttttgaaacactctttttgtgaaatctgcaagaggatatttggatagctttgaggatttcgttgcaaacgggaatggcttcatataaactctagacagaagcattctcagaaacttcgttgggatgtttcgattgaagtcccagtgttgaacattcccttttatagagcaggttggaaacactctttctgcattccctggaagtggacatttggagcgctttcaggacgacggtgaaaatggaaatatcttccaagaaaatctagatagaagcaacgtcagaaacttttctgtgatggatctactcagctaacagagttgaacctttcttttgagagagcagttttgcaacactctttttgtggaatatgcaagtggatattagggcagctttgaggatttcgttggaaacgggaatacatgtaaaaagcagacagcagcattctcagaaacttctttgtgatgtttgcattgaagtcacagagttgaacattccctttgagagagcaggtttgaaacacgccttttgtcatatctggaagtgtccattcggagcgcattcaggcttgtgttgaaaaaggaaatatcctcccataaaaactagacagaagcattctcagaaacttatctgtgatgtatgtactcaactaacagaactaaaccatcgttttgaaggagcagttttgaaacactctttttgcggaatctgcaagtggatatttggctagctgggaggatttcgttggaaacgggattacatacaaaaagcagagagcagcattctcagaaacttctttgtgatgtttgcattcaagtcacagagttgaacattccctttcatagagcaggtttgaaacactctttttgtagtatctggatgtggacatttggatcgctttcaggcctatggtgaaaaaggaaatatcttcccatgaaaactagacagaagcattctcagaaacttatttgtgatgtgtgccctcaactgacagtgttgaacctttgttttgatagagcagttctgaaacacactttttgtaaaatctgcaagaggatatttggatagctttgaggatttcgttggaaacgggaatgtcttcatgtaaactctggacagaagcattctcagaaactgctttgggatgtttcaattgaagtcccagtgttgaacattccctttcatagagcaggtttgaaacactctttttgtactatctggaagtggacatttggagcgctttcaggtctacggtgaaaaaggagatatcttccaataaaaactagatagaagcaatgtcagaacttttttcatgatgtatctactcagcaaacagagttgaacctttcttttgagagagcagttttgaaacactctttttgtggaatatgcaagtgggtattaggccagcttggaggatttcgttggaaacgggaatacgtataaaaagcagacagcagcattgtcagaaactactttgtgatgtttgcattcaagtcacagaattgaacactccctttcacagagcaggtttgaaacactctttttgtagtgtctgtaagtgaacatttggattgctttcaggcctaaggtgaaaaaggaaatatcttcccataaaaactagacagaagcattctcagaaacttgtttgtgatgtgtgccctctactgacagagttgaaactttctttgcaaagagcagttttgaaacactctttttgtagaatctgcaagaggatatttggatagctttgaggatttcttgggaaacgggaatgtcttcagataaactctagacagaagcattctcagaaacttcttcgggatgtttcaattgaagtcagtgttgaacattccctttcacagagcaggtttgaaacactctttttgtagtgtctataagtgaacatttggcgtgctttcaggcgtaacgtgaaaaaggaaatatcttcccataaaaactagacagaagcattctcagaaacttgttcttgatgtgtcccctctactgacagagttgaacctttctttgcaaagagcagctttgaaacactctttttgtagaatctgcaagaggatatttggatagcttggaggatttcgttggaaacgggtatgtcttcagataaactctagacagaagcattctcagaaacttctttgggatgttgcattcaagtcacagagtagaacattcccattcatagagcagatttgaaacactctttttgtagtatctggaagtggacatttggagcgctttcaggcctatgttgaaaaaggaaatatcttcccataaaaactagacggaagcattctcagaaacttatttgtgatgtgtttgctcaactaacaggattgaaccatcgttttgaaggagcagttttgaaacactgttttcgtggaatctgcaagtggatatttggctagctttgaggatttcgttggaaacgggattacatatacaaaggagacagcagcattctcagaaacttctttgtgatgtctgcattcaattcacagagttgagcattccctttcatagagcaggttggaaacactctttttgtagtatctggatgaggacatttggagcgctttcaggcgtatggtgaaaaaggaaatatcttcccgtaaaaactagacagaagcattctcagaagtttatttgtgatgtgtgccctcaactaacagagttgaacctttcttttgatagagcagttttgaaacactctttttgtaaaatctgcaagaggatatttggatagctttgaggatttcgttggaaacgggaatgtcttcatgtaaactctagacagaagcattctcagaaacttcgttgggatgtttcgattgaagtcccagtgttgaacattcccttttatagagcaggttggaaacactctttctgcattccctggaagtggacatttggagcgctttcaggacgacggtgaaaatggaaatatcttccaataaaatctagatagaagcaacgtcagaaacttttatgtgatggatctactcagctaacagagttgaacctttcttttgagagagcagttttgcaacactctttttgtggaatatgcaagtggatattagggcagctttgaggatttcgttggaaacgggaatacatgtaaaaagcagacagcagcattctcagaaacttctttgtgatgtttgcattgaagtcacagagttgaacattccctttgagagagcaggtttgaaacacgccttttgtcatatctggaagtgtccattcggagcgcattcaggcttgtgttgaaaaaggaaatatcctcccataaaaactagacagaagcattctgagaaacttatttgtgatgtgtgtactcaactaacagaattgaatcatcgttttgaaagagcagttttgaaacactctttttgtggaatctgcaagtggatatttgtctagctttgaggatttcgttggaaacgggattacatataaaaagcagacagcagcattctcagaaacttctttgtgatgtttgcattgaagtcccagatttgaacattccctttcatagagcaggtttgaaacacgccttttgtcatatctgcaagttgtccatttggagcgcattccggcttgtgttgaaaaaggaaatatcctcccataaaaactagatagaagcattctcagaaacttatttgtgatgtgtgtactcaactaacagaattgaaccatcgttttgaaagagcagttttgaaacactccttttgtggaatctgcaagtggatatttgtctagctttgaggatttcgttggaaacgggattacatataaaaagcagacagcagcattctcagaaacttctttgtgatgtctgcattcaattcacagagttgagcattccctttcatagagcaggttggaaacactctttttgtagtatctggatgaggacatttggagcgctttcaggcgtatggtgaaaaaggaaatatcttcccgtaaaaactagacagaagcattctcagaaatttatttgtgatgtgtgccctcaactaacagagttgaacctttcttttgatagagcagttttgaaacactctttttgtaaaatctgcaagaggatatttggatagctttgaggatttcattgcaaatgggaatggcttcatataaactctagacagaagcattctcagaaacttcgttgggatgtttcgattgaagtcccagtgttgaacattcccttttatagagcaggttggaaacagtctttctgcattccctggaagtggacatttggagcgctttcaggacgacggtgaaaatggaaatatcttccaataaaatctggatagaagcaacgtcagaaacttttatgtgatggatctactcagctaacagagttgaacctttcttttgagagagcagttttgcaacactctttttgtggaatatgcaagtggatattagggcagctttgaggatttcgttggaaacgggaatacatgtaaaaagcagacagcagcattctcagaaacttctttgtgatgtttgcattgaagtcacagagttgaacattccctttgagagagcaggtttgaaacacgccttttgtcatatctggaagtgtccattcggagcgcattcaggcttgtgttgaaaaaggaaatatcctcccataaaaactagacagaagcattctcagaaacttatgtgtgatgtatgtactcaactaacagaactaaaccatcgttttgaaggagcagttttgaaacactctttttgcggaatctgcaagtggatatttggctagctgggaggatttcgttggaaacgggattacatacaaaaagcagagagcagcattctcagaaacttctttgtgatgtttgcattcaagtcacagagttgaacattccctttcatagagcaggtttgaaacactctttttgtagtatctggatgtggacatttggatcgctttcaggcctatggtgaaaaaggaaatatcttcccatgaaaactagacagaagcattctcagaaatttatttgtgatgtgtgccctcaactaacagagttgaacctttcttttgatagagcagttttgaaacactctttttgtaaaatctgcaagaggatatttggatagctttgaggatttcattgcaaacgggaatggcttcatataaactctagacagaagcattctcagaaacttcgttgggatgtttcgattgaagtcccagtgttgaacattcccttttatagagcaggttggaaacactctttttgcattccctggaagtggacatttggagcgctttcaggacgacggtgaaaatggaaatatcttccaagaaaatctagatagaagcaatgtcagaaacttttatgtgatggatctactcagctaacagagttgaacctttcttttgagagagcagttttgcaacactctttttgtggaatatgcaagtggatattagggcagctttgaggatttcgttggaaacgggaatacatgtaaaaagcagacagcagcattctcagaaacttctttgtgatgtttgcattgaagtcacagagttgaacattccctttgagagagcaggtttgaaacacgccttttgtcatatctggaagtgtccattcggagcgcattcaggcttgtgttgaaaaaggaaatatcctcccataaaaactagacagaagcattctcagaaacttatctgtgatgtatgtactcaactaacagaactaaaccatcgttttgaaggagcagttttgaaacactctttttgcggaatctgcaagtggatatttggctagctgggaggatttcgttggaaacgggattacatacaaaaagcagacagcagcattctcagaaacttctttgtgatgtttgcattcaagtcacagagttgaacattccctttcatagagcaggtttgaaacactctttttgtagtatctggatgtggacatttggatcgctttcaggcctatggtgaaaaaggaaatatcttcccatgaaaactagacagaagcattctcagaaacttatttgtgatgtgtgccctcaactgacagtgttgaacctttgttttgatagagcagttctgaaacacactttttgtaaaatctgcaagaggatatttggatagctttgaggatttcgttggaaacgggaatgtcttcatgtaaactctagacagaagcattctcagaaactgctttgggatgtttcaattgaagtcccagtgttgaacattccctttcatagaggaggtttgaaacactctttttgtactatctggaagtggacatttggagcgctttcaggtctacggtgaaaaaggagatatcttccaataaaaactagatagaagcaatgtcagaacttttttcatgatgtatctactcagcaaacagagttgaacctttcttttgagagagcagttttgaaacactctttttgtggaatatgcaagtgggtattaggccagcttggaggatttcgttggaaacgggaatacgtataaaaagcagacagcagcattgtcagaaactactttgtgatgtttgcattcaagtcacagaattgaacactccctttcacagagcaggtttgaaacactctttttgtagtgtctgtaagtgaacatatggattgctttcaggcctaaggtgaaaaaggaaatatcttcccataaaaactagacagaagcattctcagaaacttgtttgtgatgtgtgccctctactgacagagttgaacctttctttgcaaagagcagttttgaaacactctttttgtagaatctgcaagaggatatttggatagctttgaggatttcttgggaaacgggaatgtcttcagataaactctagacagaagcattctcagaaacttctttgggatgtttcaattgaagtcacagtgttgaacattccctttcacagagcaggtttgaaacactctttttgtagtgtctataagtgaacatttggcgtgctttcaggcgtaacgtgaaaaaggaaatatcttcccataaaaactagacagaagcattctcagaaacttgttcttgatgtgtcccctctactgacagagttgaacctttctttgcaaagagcagctttgaaacactctttttgtagaatctgcaagaggatatttggatagcttggaggatttcgttggaaacgggtatgtcttcagataaactctagacagaagcattctcagaaacttctttgggatgttgcattcaagtcacagagtagaacattcccattcatagagcagatttgaaacactctttttgtagtatctggaagtggacatttggagcgctttcaggcctatgttgaaaaaggaaatatcttcccataaaaactagacggaagcattctcagaaacttatttgtgatgtgtttgctcaactaacaggattgaaccatcgttttgaaggagcagttttgaaacactgttttcgtggaatctgcaagtggatatttggctagctttgaggatttcgttggaaacgggattacatataaaaaggagacagcagcattctcagaaacttctttgtgatgtctgcattcaattcacagagttgagcattccctttcctagagcacgttggaaacactctttttgtagtatctggatgaggacatttggagcgctttcaggcgtatggtgaaaaaggaaatatcttcccgtaaaaactagacagaagcattctcagaaatttatttgtgatgtgtgccctcaactaacagagttgaacctttcttttgatagagcagttttgaaacactctttttgtaaaatctgcaagaggatatttggatagctttgaggatttcgttgcaaacgggaatggcttcatataaactctagacagaaagcattctcagaaacttcgtcgggatgtttcgattgaagtcccagtgttgaacattcccttttatagagcaggttggaaacactctttctgcattccctggaagtggacaattggagcgctttcaggacgacggtgaaaatggaaatatcttccaataaaatctggatagagcaacgtcagaaacttttctgtgatggatctactcagctaacagagttgaacctttcttttgagagagcagttttgcaacactctttttgtggaatatgcaagtggatattagggcagctttgaggatttcgttggaaacgggaatacatgtaaaaagcagacagcagcattctcagaaacttctttgtgatgtttgcattgaagtcacagagttgaacattccctttgagagagcaggtttgaaacacgccttttgtcatatctggaagtgtccattcggagcgcattcaggcttgtgttgaaaaaggaaatatcctcccataaaaactaggacggaagcattctcagaaacttatctgtgatgtatgtactcaactaacagaactaaaccatcgttttgaaggagcagttttgaaacactctttttgcggaatctgcaagtggatatttggctagctgggaggatttcgttggaaacgggattacatacaaaaagcagacagcagcattctcagaaacttctttgtgatgtttgcattcaagtcacagagttgaacattccctttcatagagcaggttggaaacactctttttgtagtatctggatgtggacatttggatcgctttcaggcctatggtgaaaaaggaaatatcttcccatgaaaactagacagaagcattctcagaaacttatttgtgatgtgtgccctcaactgacagtgttgaacctttgttttgatagagcagttctgaaacacactttttgtaaaatctgcaagaggatatttggatagctttgaggatttcgttggaaacgggaatgtcttcatgtaaactctagacagaagcattctcagaaactgctttgggatgtttcaattgaagtcccagtgttgaacattccctttcatagagcaggtttgaaacactctttttgtactatctggaagtggacatttggagcgctttcaggtctacggtgaaaaaggagatatcttccaataacaactagatagaagcaatgtcagaacttttttcatgatgtatctactcagcaaacagagttgaacctttcttttgagagagcagttttgaaacactctttttgtggaatatgcaagtgggtattaggccagcttggaggatttcgttggaaacgggaatacgtataaaaagcagacagcagcattgtcagaaactactttgtgatgtttgcattcaagtcacagaattgaacactccctttcacagggcaggtttgaaacactctttttgtagtgtctgtaagtgaacatttggattgctttcaggcctaaggtgaaaaaggaaatatcttcccataaaaactagacagaagcattctcagaaacttgtttgtgatgtgtgccctctactgacagagttgaaactttctttgcaaagagcagttttgaaacactctttttgtagaatctgcaagaggatatttggatagctttgaggatttcttgggaaacgggaatgtcttcagataaactctagacagaagcattctcagaaacttctttgggatgtttcaattgaagtcagtgttgaacattccctttcacagagcagttttgaaacactctttttgtagtgtctataagtgaacatttggcgtgctttcaggcctaacgtgaaaaaggaaatatcttcccataaaaactagacagaagcattctcagaaacttgttcttgatgtgtcccctctactgacagagttgaacctttctttgcaaagagcagctttgaaacactctttttgtagaatctgcaagaggatatttggatagcttggaggatttcgttggaaacgggtatgtcttcagataaactctagacagaagcattctcagaaacttctttgggatgttgcattcaagtcacagagtagaacattcccattcatagagcagatttgaaacactctttttgtagtatctggaagtggacatttggagcgctttcaggcctatgttgaaaaaggaaatatcttcccataaaaactacacggaagcattctcagaaacttatttgtgatgtgtttgctcaactaacaggattgaaccatcgttttgaaggagcagttttgaaacactgttttcgtggaatctgcaagtggatatttggctagctttgaggatttcgttggaaacgggattacatataaaaaggagacagcagcattctcagaaacttctttgtgatgtctgcattcaagtcacagagttgagcattccctttcatagagaaggttggaaacactctttttgtagtatctggatgaggacatttggagcgctttcaggcgtatggtgaaaaaggaaatatcttcccgtaaaaactagacagaagattctcagaaatttatttgtgatgtgtgccctcaactaacagagttgaacctttcttttgatagagcagttttgaaacactctttttgtaaaatctgcaagaggatatttggatagctttgaggatttcgttgcaaacgggaatggcttcatataaactctagacagaagcattctcagaaacttcgttgggatgtttcgattgaagtcccagtgttgaacattcccttttatagagcaggttggaaacactctttctgcattccctggaagtggacatttggagcgctttcaggacgacggtgaaaatggaaatatcttccaagaaaatctagatagaagcaacgtcagaaacttttatgtgatggatctactcagctaacagagttgaacctttcttttgagagagcagttttgcaacactctttttggggaatatgcaagtggatattagggcagctttgaggatttcgttggaaacgggaatacatgtaaaaagcagacagcagcattctcagaaacttctttgtgatgtttgcattgaagtcacagagttgaacatcccctttgagagagcaggtttgaaacacgccttttgtcatatctggaagtgtccattcggagcgcattcaggcttgtgttgaaaaaggaaatatcctcccataaaaactagacagaagcattctcagaaacttatctgtgatgtatgtactcaactaacagaactaaaccatcgttttgaagggcagtttagaaacactctttttgcggaatctgcaagtggatatttggctagctgggaggatttcgttggaaacgggattacatacaaaaagcagacagcagcattctcagaaacttatttgtgatgtgtgccctcaactgacagtgttgaacctttgttttgatagagcagttctgaaacacactttttgtaaaatctgcaagaggatatttggatagctttgaggatttcgttggaaacgggaatgtcttcatgtaaactctagacagaagcattctcagaaactgctttgggatgtttcaattgaagtcccagtgttgaacattccctttcatagagcaggtttgaaacactctttttgtactatctggaagtggacatttggagcgctttcaggtctacggtgaaaaaggagatatcttccaataaaaactagatagaagcaatgtcagaacttttttcatgatgtatctactcagcaaacagagttgaacctttcttttgagagagcagttttgaaacactctttttgtggaatatgcaagtgggtattaggccagcttggaggatttcgttggaaacgggaatacgtataaaaagcagacagcagcattgtcagaaactactttgtgatgtttgcattcaagtcacagaattgaacactccctttcacagagcaggtttgaaacactctttttgtagtgtctgtaagtgaacatttggattgctttcaggcctaaggtgaaaaaggaaatatcttcccataaaaactagacagaagcattctcagaaacttgtttgtgatgtgtgccctctactgacagagttgaacctttctttgcaaagagcagttttgaaacactctttttgtagaatctgcaagaggatatttggatagctttgaggatttcttgggaaacgggaatgtcttcagataaactctagatagaagcattctcagaaacttctttgggatgtttcaattgaagtcacagtgttgaacattccctttcacagagcaggtttgaaacactctttttgtagtgtctataagtgaacatttggcgtgctttcaggcgtaacgtgaaaaaggaaatatcttcccataaaaaccagacagaagcgttctcagaaacttgttcttgatgtgtgccctctactgacagagttgaacctttctttgcaaagagcagctttgaaacactctttttgtagaatctgcaagaggatatttggatagctttgaggatttcgttggaaacgggtatgtcttcagataaactctagacagaagcattctcagaaacttctttgggatgttgcattcaagtcacagagtagaacattcccattcatagagcagatttgaaacactctttttgtagtatctggaagtggacatttggagcgctttcaggcctatgttgaaaaaggaaatatcttcccatgaaaactagacagaagcattctcagaaacttatttgtgatgtgtttgctcaactaacaggattgaaccatcgttttgaaggagcagttttgaaacactgttttcgtggaatctgcaagtggatatttggctagctttgaggatttcgttggaaacgggattacatatacaaaggagacagcagcattctcagaaacttctttgtgatgtctgcattcaattcacagagttgagcattccctttcatagagcaggttggaaacactctttttgtagtatctggatgaggacatttggagcgctttcatgcctatggtgaaaaaggaaatatcttcccgtaaaaactagacagaagcattctcagaaatttatttgtgatgtgtgccctcaactaacagagttgaacctttcttttgatagagcagttttgaaacactctttttgtaaaatctgcaagaggatatttggatagctttgaggatttcattgcaaacgggaatggcttcatataaactctagacagaagcattctcagaaacttcgttgggatgtttcgattgaagtcccagtgttgaacattcccttttatagagcaggttggaaacactctttctgcattccctggaagtggacatttggagcgctttcaggacgacggtgaaaatggaaatatcttccaagaaaatctagatagaagcaacgtcagaaacttttatgtgatggatctactcagctaacagagttgaacctttcttttgagagagcagttttgcaacactctttttgtggaatatgcaagtggatattagggcagctttgaggatttcgttggaaacgggaatacatgtaaaaagcagacagcagcattctcagaaacttctttgtgatgtttgtattgaagtcacagagttgaacattccctttgagagagcaggtttgaaacacgccttttgtcatatctggaagtgtccattcggagcgcattcaggcttgtgttgaaaaaggaaatatcctcccataaaaactagacagaagcattctcagaaacttatttgtgatgtatgtactcaactaacagaactaaaccatcgttttgaaggagcagttttgaaacactctttttgcggaatctgcaagtggatatttggctagctgggaggatttcgttggaaacgggattacatacaaaaagcagacagcagcattctcagaaacttctttgtgatgtttgcattcaagtcacagagttgaacattccctttcatagagcaggtttgaaacactctttttgtagtatctggatgtggacatttggatcgctttcaggcctatggtgaaaaaggaaatatcttcccatgaaaactagacagaagcattctcagaaacttatttgtgatgtgtgccctcaactgacagtgttgaacctttgttttgatagagcagttctgaaacacactttttgtaaaatctgcaagaggatatttggatagctttgaggatttcgttggaaacgggaatgtcttcatgtaaactctacacagaagcattctcagaaactgctttgggatgtttcaattgaagtcccagtgttgaacattccctttcatagagcaggtttgaaaccctctttttgtactatctggaagtggacatttggagcgctttcaggtctacggtgaaaaaggagatatcttccaataaaaactagatagaagcaatgtcagaacttttttcatgatgtatctactcagcaaacagagttgaacctttcttttgagagagcagttttgaaacactccttttgtggaatatgcaagtgggtattaggccagcttggaggatttcgttggaaacgggaatacgtataaaaagcagacagcagcattgtcagaaactactttgtgatgtttgcattcaagtcacagaattgaacactccctttcacagagcaggtttgaaactctctttttgtagtgtctataagtgaacatttggcgtgctttcaggcgtaacgtgaaaaaggaaatatcttcccataaaaactagacagaagcattctcagaaacttgttcttgatgtgtgccctctactgacagagttgaacctttctttgcaaagagcagttttgaaacactctttttgtagaatctgcaagaggatatttggatagctttgaggatttcttgggaaacgggaatgtcttcagataaactctagacagaagcattctcagaaacttctttgggatgtttcaattcaagtcacagtgttgaacattccctttcacagagcaggtttgaaacactctttttgtagtgtctataagtgaacatttggcgtgctttcaggcgtaacgtgaaaaaggaaatatcttcccataaaaactagacagaagcattctcagaaacttgttcgtgatgtgtgccctctactgacagagttgaacctttctttgcaaagagcagctttgaaacactctttttgtagaatctgcaagaggatatttggatagcttggaggatttcgttggaaacgggtatgtcttcagataaactgctagacagaagcattctcagaaacttctttgggatgttgcattcaagtcacagagtagaacattcccattcatagagcagatttgaaacactctttttgtagtatctggaagtggacatttggagcgctttcaggcctatgttgaaaaaggaaatatcttcccataaaaactagacggaagcattctcagaaacttacttgtgatgtgtttgctcaactaacaggattgaaccatcgttttgaaggagcagttttgaaacactgttttcgtggaatctgcaagtggatatttggctagctttgaggatttcgttggaaacgggattacatataaaaaggagacagcagcattctcagaaacttctttgtgatgtctgcattcaagtcacagagttgagcattccctttcatagagcaggttggaaacactctttttgtagtatctggatgaggacatttggagcgctttcaggcgtatggtgaaaaaggaaatatcttcccgtaaaaactagacagaagcattctcagaattttatttgtgatgtgtgccctcaactaacagagttgaacctttcttttgatagagcagttttgaaacactctttttgtaaaatctgcaagaggatatttggatagctttgaggatttcgttgcaaacgggaatggcttcatataaactctagacagaaacattctcagaaacttcgttgggatgtttcgattgaagtcccagtgttgaacattcccttttatagagcaggttggaaacactctttctgcattccctggaagtggacatttggagcgctttcaggacgacggtgaaaatggaaatatcttccaagaaaatctagatagacgcaacgtcagaaacttttctgtgatggatctactcagctaacagagttgaacctttcttttgagagagcagttttgcaacactctttttgtggaatatgcaagtggatattagggcagctttgaggatttcgttggaaacgggaatacatgtaaaaagcagacagcagcattctcagaaacttctttgtgatgtttgcattgaagtcacagagttgaacattccctttgagagagcaggtttgaaacacgccttttgtcatatctggaagtgtccattcggagcgcattcaggcttgtgttgaaaaaggaaatatcctcccataaaaactagacagaagcattctcagaaagttatcagtgatgtatgtactcaactaacagaactaaaccatcgttttgaaggagcagttttgaaacactctttttgcggaatctgcaagtggatatttggctagctgggaggatttcgttggaaacgggattacatacaaaaagcagacagcagcattctcagaaacttatttgtgatgtgtgccctcaactgacagtgttgaacctttgttttgatagagcagttctgaaacacactttttgtaaaatctgcaagaggatatttggatagctttgaggatttcggtggaaacgggaatgtcttcatgtaaactctagacagaagcattctcagaaactgctttgggatgtttcaattgaagtcccagtgttgaacattccctttcatagagcaggtttgaaacactctttttgtactatctggaagtggacatttggagcgctttcaggtctacggtgaaaaaggagatatcttccaataaaaactagatagaagcaatgtcagaacttttttcatgatgtatctactcagcaaacagagttgaacctttcttttgagagagcagttttgaaacactctttttgtggaatatgcaagtgggtattaggccagcttagaggatttcgttggaaacgggaatacgtataaaaagcagacagcagcattgtcagaaactactttgtgatgtttgcattcaagtcacagaattgaacactccctttcacagagcaggtttgaaacactctttttgtagtgtctgtaagtgaacatttggattgcgttcaggcctaaggtgaaaaaggaaatatcttcccataaaaactagacagaagcattctcagaaacttgtttgtgatgtgtgccctctactgacagagttgaacctttctttgcaaagagcagttttgaaacactctttttgtagaatctgcaagaggatatttggatagctttgaggatttcttgggaaacgggaatgtcttcagataaactctagacagaagcattctcagaaacttctttgggatgtttcaattgaagtcacagtgttgaacattccctttcacagagcaggtttgaaacactctttttgtagtgtctataagtgaacatttggcgtgctttcaggcctaacgtgaaaaaggaaatatcttcccataaaaactagacagaagcattctcagaaacttgttcttgatgtgtcccctctactgacagagttgaacctttctttgcaaagagcagctttgaaacactctttttgtagaatctgcaagaggatatttggatagcttggaggatttcgttggaaacgggtatgtcttcagataaactctagacagaagcattctcagaaacatctttgggatgttgcattcaagtcacagagtagaacattcccattcatagagcagatttgaaacactctttttgtagtatctggaagtggacatttggagcgctttcaggcctatgttgaaaaaggaaatatcttcccataaaaactagacggaagcattctctgaaacttatttgtgatgtgtttgctcaactaacaggattgaaccatcgttttgaaggagcagttttgaaacactgttttcgtggaatctgcaagtggatatttggctagctttgaggatttcgttggaaacgggattacatataaaaaggagacagcagcattctcagaaacttctttgtgatgtctgcattcaagtcacagagttgagcattccctttcatagagcaggttggaaacactctttttgtagtatctggatgaggacatttggagcgctttcaggcgtatggtgaaaaaggaaatatcttcccgtaaaaactagacagaagcattctcagaaatttatttgtgatgtgtgccctcaactaacagagttgaacctttcttttgatagagcagttttgaaacactctttttgtaaaatctgcaagaggatatttggatagctttgaggatttcgttgcaaacgggaatggcttcatataaactctagacagaagcattctcagaaacttcgttgggatgtttcgattgaagtcccagtgttgaacattcccttttatagagcaggttggaaacactctttctgcattccctggaagtggacatttggagcgctttcaggacgacggtgaaaatggaaatatcttccaagaaaatctagatagaagcaacgtcagaaacttttctgtgatggatctactcagctaacagagttgaacctttcttttgagagagcagttttgcaacactctttttgtggaatatgcaagtggatattagggcagctttgaggatttcgttggaaacgggaatacatgtaaaaagcagacagcagcattctcagaaacttctttgtgatgtttgcattgaagtcacagagttgaacattccctttgagagagcaggtttgaaacacgccttttgtcatatctggaagtgtccattcggagcgcattcaggcttgtgttgaaaaaggaaatatcctcccataaaaactagacagaagcattctcagaaacttatctgtgatgtatgtactcaactaacagaactaaaccatcgttttgaaggagcagttttgaaacactctttttgcggaatctgcaagtggatatttggctagctgggaggatttcgttggaaacgggattacatacaaaaagcagacagcagcattctcagaaacttctttgtgatgtttgcattcaagtcacagagttgaacattccctttcatagagcaggtttgaaacactctttttgtagtatctggatgtggacatttggatcgctttcaggcctatggtgaaaaaggaaatatcttcccatgaaaactagacagaagcattctcagaaacttatttgtgatgtgtgccctcaactgacagtgttgaacctttgttttgatagagcagttctgaaacacactttttgtaaaatctgcaagaggatatttggatagctttgaggatttcgttggaaacgggaatgtcttcatgtaaactctacacagaagcattctcagaaactgctttgggatgtttcaattgaagtcccagtgttgaacattcccattcatagagcaggtttgaaacactctttttgtactatctggaagtggacatttggagcgctttcaggtctacggtgaaaaaggagatatcttccaataaaaactagatagaagcaatgtcagaacttttttcatgatgtatctactcagcaaacagagttgaacctttcttttgagagagcagttttgaaacactctttttgtggaatatgcaagtgggtattaggccagcttggaggatttcgttggaaacgggaatacgtataaaaagcagacagcagcattgtcagaaactactttgtgatgtttgcattcaagtcacagaattgaacactccctttcacagagcaggtttgaaacacactttttgtagtgtctgtaagtgaacatttggattgctttcaggcctaaggtgaaaaagaaaatatcttcccataaaaactagacagaagcattctcagaaacttgtttgtgatgtgtgccctctactgacagagttgaacctttctttgcaaagagcagttttgaaacactctttttgtagaatctgcaagaggatatttggatagctttgaggatttcttgggaaacgggaatgtcttcagataaactctagacagaagcattctcagaaacttctttgggatgtttcaattgaagtcacagtgttgaacattccctttcacagagcaggtttgaaacactctttttgtagtgtctataagtgaacatttggcgtgctttcaggcctaacgtgaaaaaggaaatatcttcccataaaaactagacagaagcattctcagaaacttgttcgtgatgtgtgccctctactgacagagttgaacctttctttgcaaagagcagctttgaaacacactttttgtagaatcagcaagaggatatttggatagctttgaggatttcgttggaaacgggtatgtcttcagataaactctagacagaagcattctcagaaacttctttgggatgttgcattcaagtcacagagtagaacattcccattcatagagcagatttgaaacactctttttgtagtatctggaagtggacatttggagcgctttcaggcctatgttgaaaaaggaaatatcttcccataaaaactagacggaagcattctcagaaacttatttgtgatgtgtttgctcaagtaacaggattgaaccatcgttttgaaggagcagttttgaaacactgttttcgtggaatctgcaagtggatatttggctagctttgaggatttcgttggaaacgggattacatataaaaaggagacagcagcattctcagaaacttctttgtgatgtctgcattcaattcacagagttgagcattccctttcatagagcaggttggaaacactctttttgtagtatctggatgaggacatttggagcgctttcaggcgtatggtgaaaaaggaaatatcttcccgtaaaaactagacagaagcattctcagaagtttatttctgatgtgtgccctcaactaacagagttgaacctttcttttcatagagcagttttgaaacactctttttgtaaaatctgcaagaggatatttggatagctttgaggatttcgttgcaaacgggaatggcttcatataaactctagacagaaagcattctcagaaacttcgtcgggatgtttcgattgaagtcccagtgttgaacattcccttttatagagcaggttggaaacactctttctgcattccctggaagtggacaattggagcgctttcaggacgacggtgaaaatggaaatatcttccaataaaatctggatagagcaatgtcagaaactattctgtgatggatctactcagctaacagagttgaacctttcttttgagagagcagttttgcaacactctttttgtggaatatgcaagtggatattagggcagctttgaggatttcgttggaaacgggaatacatgtaaaaagcagacagcagcattctcagaaacttctttgtgatgtttgcattgaagtcacagagttgaacattccctttgagagagcaggtttgaaacacgccttttgtcatatctggaagtgtccattcggagcgcattcaggcttgtgttgaaaaagaaaatatcctcccataaaaactagacagaagcattctcagaaacttatctgtgatgtatgtactcaactaaccgaactaaaccatcgttttgaaggagcagttttgaaacactctttttgcggaatctgcaagtggatatttggctagctgggaggatttcgttggaaacgggattacatacaaaaagcagacagcagcattctcagaaacttctttgtgatgtttgcattcaagtcacagagttgaacattccctttcatagagcaggtttgaaacactctttttgtagtatctggatgtggacatttggatcgctttcaggcctatggtgaaaaaggaaatatcttcccatgaaaactagacagaagcattctcagaaacttgtttgtgatgtgtgccctcaactgacagtgttgaacctttgttttgatagagcagttctgaaacacactttttgtaaaatctgcaagaggatatttggatagctttgaggatttcgttggaaacggaaatgtcttcatgtaaactctacacagaagcattctcagaaactgctttgggatgtttcaattgaagtcccagtgttaaacattcccattcatagagcaggtttgaaacactctttttgtactatctggaagtggacatttggagcgctttcaggtctacggtgaaaaaggagatatcttccaataaaaactagatagaagcaatgtcagaacttttttcatgatgtatctactcagcaaacagagttgaacctttcttttgagagagcagttttgaaacactctttttgtggaatatgaaagtgggtattaggccagcttggaggatttcgttggaaacgggaatacgtataaaaagcagacagcagcattgtcagaaactactttgtgatgtttgcattcaagtcacagaactgaacactccctttcacagagcaggtttgaaacactctttttgtagtgtctgtaagtgaacatttggattgctttcaggcctaaggtgaaaaaggaaatatcttcccataaaaactagacagaagcattctcagaaacttgtttgtgatgtgtgccctctactgacagagttgaacctttctttgcaaagagcagttttgaaacactctttttgtagaatctgcaagaggatatttggatagctttgaggatttcttgggaaacgggaatgtcttcagataaactctagacagaagcattctcagaaacttctttgggatgtttcaattgaagtcacagtgttgaacattccctttcacagagcaggtttgaaacactctttttgtagtgtctataattgaacatttggcgtgctttcaggcctaacgtgaaaaaggaaatatcttcccataaaaactagacagaagcattctcagaaacttgttcgtgatgtgtgccctctactgacagagttgaacctttctttgcaaagagcagctttgaaacactctttttgtagaatctgcaagaggatatgtggatagctttgaggatttcgttggaaacgggtatgtcttcagataaactctagacagaagcattctcagaaacttctttgggatgtttcaattgaagtcacagtgttgaacattccctttcacagagcaggtttgaaacactctttttgtagtgtctataagtgaacatttggcgtgctttcaggcctaacgtgaaaaaggaaatatcttcccataaaaactagacagaagcattctcagaaacttgttcatgatgtgtgccctctactgacagagttgaacctttctttgcaaagagcagctttgaaacactctttttgtagaatctgcaagaggatatttggatagctttgaggatttcgttggaaacgggtatgtcttcagataaactctagacagaagcattctcagaaacttctttgggatgttgcattcaagtcacagagtagaacattcccattcatagagcagatttgaaacactctttttgtagtatctggaagtggacatttggagcgctttcaggcctatgttgaaaaaggaaatatcttcccataaaaactagacggaagcattctcagaaacttacttgtgatgtgtttgctcaactaacagaattgaaccatcgttttgaaggagcagttttgaaacactgttttcgtggaatctgcaagtggatatttggctagctttgaggatttcgttggaaacgggattacatatacaaaggagacagcagcattctcagaaacttctttgtgatgtctgcattcaagtcacagagttgagcattccctttcatagagcaggttggaaacactctttttgtagtatctggatgaggacatttggagcgctttcaggcgtatggtgaaaaaggaaatatcttcccgtaaaaactagacagaagcattctcagaaatttatttgtgatgtgtgccctcaactaacagagttgaacctttcttttgatagagcagttttgaaacactctttttgtaaaatctgcaagaggatatttggatagctttgaggatttcgttgcaaacgggaatggcttcatataaactctagacagaagcattctcagaaacttcgttgggatgtttcgattgaagtcccagtgttgaacattcccttttatagagcaggttggaaacactctttctgcattccctggaagtggacatttggagcgctttcaggacgacggtgaaaatggaaatatcttccaagaaaatctagatagaagcaacgtcagaaacttttctgtgatggatctactcagctaacagagttgaacctttcttttgagagagcagttttgcaacactctttttgtggaatatgcaagtggatattagggcagctttgaggatttcgttggaaacgggaatacatgtaaaaagcagacagcagcattctcagaaacttctttgtgatgtttgcattgaagtcacagagttgaacattccctttgagagagcaggtttgaaacacgccttttgtcatatctggaagtgtccattcggagcgcattcaggcttgtgttgaaaaaggaaatatcctcccataaaaactagacagaagcattctcagaaacttatctgtgatgtatgtactcaactaacagaactaaaccatcgttttgaaggagcagttttgaaacactctttttgcggaatctgcaagtggatatttggctagctgggaggatttcgttggaaacgggattacatacaaaaagcagacagcagcattctcagaaacttctttgtgatgtttgcattcaagtcacagagttgaacattccctttcatagagcaggtttgaaacactctttttgtagtatctggatgtggacatttggatcgctttcaggcctatggtgaaaaaggaaatatcttcccatgaaaactagacagaagcattctcagaaacttatttgtgatgtgtgccctcaactgacagtgttgaacctttgttttgatagagcagttctgaaacacactttttgtaaaatctgcaagaggatatttggatagctttgaggatttcgttggaaacgggaatgtcttcatgtaaactctacacagaagcattctcagaaactgctttgggatgtttcaattgaagtcccagtgttgaacattccctttcatagagcaggtttgaaaccctctttttgtactatctggaagtggacatttggagcgctttcaggtctacggtgaaaaaggagatatcttccaataaaaactagatagaagcaatgtcagaacttttttcatgatgtatctactcagcaaacagagttgaacctttcttttgagagagcagttttgaaacactctttttgtggaatatgcaagtgggtattaggccagcttggaggatttcgttggaaacgggaatacgtataaaaagcagacagcagcattgtcagaaactactttgtgatgtttgcattcaagtcacagaattgaacactccctttcacagagcaggtttgaaactctctttttgtagtgtctataagtgaacatttggcgtgctttcaggcgtaacgtgaaaaaggaaatatcttcccataaaaactagacagaagcattctcagaaacttgttcttgatgtgtgccctctactgacagagttgaacctttctttgcaaagagcagttttgaaacactctttttgtagaatctgcaagaggatatttggatagctttgaggatttcttgggaaacgggaatgtcttcagataaactctagacagaagcattctcagaaacttctttgggatgtttcaattgaagtcacagtgttgaacattccctttcacagagcaggtttgaaacactctttttgtagtgtctataagtgaacatttggcgtgctttcaggcgtaacgtgaaaaaggaaatatcttcccataaaaactagacagaagcattctcagaaacttgttcttgatgtgtcccctctactgacagagttgaacctttctttgcaaagagcagctttgaaacactctttttgtagaatctgcaagaggatatttggatagcttggaggatttcgttggaaacgggtatgtcttcagataaactctagacagaagcattctcagaaacttctttgggatgttgcattcaagtcacagagtagaacattcccattcatagagcagatttgaaacactctttttgtagtatctggaagtggacattgggagcgctttcaggcctatgttgaaaaaggaaatatcttcccataaaaactagacggaagcattctcagaaacttatttgtgatgtgtttgctcaactaacaggattgaaccatcgttttgaaggagcagttttgaaacactgttttcgtggaatctgcaagtggatatttggctagctttgaggatttcgttggaaacgggattacatataaaaaggagacagcagcattctcagaaacttctttgtgatgtctgcattcaagtcacagagttgagcattccctttcatagagcaggttggaaacactctttttgtagtatctggatgaggacatttggagcgctttcaggcctatggtgaaaaaggaaatatcttcccgtaaaaactagacagaagcattctcagaaatttatttgtgatgtgtgccctcaactaacagagttgaacctttcttttgatagagcagttttgaaacactctttttgtaaaatctgcaagaggatatttggatagctttgaggatttcgttgcaaacgggaatggcttcatataaactctagacagaagcattctcagaaacttcgttgggatgtttcgattgaagtcccagtgttgaacattcccttttatagagcaggttggaaacactctttctgcattccctggaagtggacatttggagcgctttcaggacgacggtgaaaatggaaatatcttccaagaaaatctagatagaagcaatgtcagaaacttttatgtgatggatctactcagctaacagagttgaacctttcttttgagagagcagttttgcaacactctttttgtggaatatgcaagtggatattagggcagctttgaggatttcgttggaaacgggaatacatgtaaaaagcagacagcagcattctcagaaacttctttgtgatgtttgcattgaagtcacagagttgaacattccctttgagagagcaggtttgaaacacgccttttgtcatatctggaagtgtccattcggagcgcattcaggcttgtgttgaaaaaggaaatatcctcccataaaaactagacagaagcattctcagaaacttatttgtgatgtatgtactcaagtaacagaactaaaccatcgttttgaaggagcagttttgaaacactctttttgcggaatctgcaagtggatatttggctagctgggaggatttcgttggaaacgggattacatacaaaaagcagacagcagcattctcagaaacttctttgtgatgtttgcattcaagtcacagagttgaacattccctttcatagagcaggtttgaaacactctttttgtagtatctggatgtggacatttggatcgctttcaggcctatggtgaaaaaggaaatatcttcccatgaaaactagacagaagcattctcagaaacttatttgtgatgtgtgccctcaactgacagtgttgaacctttgttttgatagagcagttctgaaacacactttttgtaaaatctgcaagaggatatttggatagctttgaggatttcgttggaaacgggaatgtcttcatgtaaactctagacagaagcattctcagaaactgctttgggatgtttcaattgaagtcccagtgttgaacattccctttcatagagcaggtttgaaacactctttttgtagtatctggatgaggacatttggagcgctttcaggcgtatggtgaaaaaggaaatatcttcccgtaaaaacaagacagaagcattctcagaagtttatttctgatgtgtgccctcaactaacagagttgaacctttcttttgatagagcagttttgaaacactctttttgtaaaatctgcaagaggatatttggatagctttgaggatttcgttgcaaacgggaatggcttcatataaactctagacagaaagcattctcagaaacttcgtcgggatgtttcgattgaagtcccagtgttgaacattcccttttatagagcaggttggaaacactctttctgcattccctggaagtggacaattggagcgctttcaggacgacggtgaaaatggaaatatcttccaataaaatctggatagagcaatgtcagaaacttttatgtgatggatctactcagctaacagagttgaacctttcttttgagagagcagttttgcaacactctttttgtggaatatgcaagtggatattagggcagctttgaggatttcgttggaaacgggaatacatgtaaaaagcagacagcagcattctcagaaacttctttgtgatgtttgcattgaagtcacagagttgaacattccctttgagagagcaggtttgaaacacgccttttgtcatatctggaagtgtccattcggagcgcattcaggcttgtgttgaaaaaggaaatatcctcccataaaaactagacagaagcattctcagaaacttatctgtgatgtatgtactcaactaacagaactaaaccatcgttttgaaggagcagttttgaaacactctttttgcggaatctgcaagtggatatttggctagctgggaggatttcgttggaaacgggattacatacaaaaagcagacagcagcattctcagaaacttctttgtgatgtttgcattcaagtcacagagttgaacattccctttcatagagcaggtttgaaacactctttttgtagtatctggatgtggacatttggatcgctttcaggcctatggtgaaaaaggaaatatcttcccatgaaaactagacagaagcattctcagaaacttatttgtgatgtgtgccctcaactgacagtgttgaacctttgttttgatagagcagttctgaaacacactttttgtaaaatctgcaagaggatatttggatagctttgaggatttcgttggaaacgggaatgtcttcatgtaaactctagacagaagcattctcagaaactgctttgggatgtttcaattgaagtcccagtgttgaacattccctttcatagagcaggtttgaaacactctttttgtactatctggaagtggacattcggagcgctttcaggtctacggtgaaaaaggagatatcttccaataacaactagatagaagcaatgtcagaacttttttcatgatgtatctactcagcaaacagagttgaaccctttcttttgagagagcagttttgaaacactctttttgtggaatatgcaagtgggtattaggccagcttggaggatttcgttggaaacgggaatacgtataaaaagcagacagcagcattgtcagaaactactttgtgatgtttgcattcaagtcacagaattgaacactccctttcacagagcaggtttgaaacactctttttgtagtgtctgtaagtgaacatttggattgctttcaggcctaaggtgaaaaaggaaatatcttcccataaaaactagacagaagcattctcagaaacttgtttgtgatgtgtgccctctactgacagagttgaacctttctttgcaaagggcagttttgaaacactctttttgtagaatctgcaagaggatatttggatagctttgaggatttcttgggaaacgggaatgtcttcagataaactctagacagaagcattctcagaaacttctttgggatgtttcaattgaagtcacagtgttgaacattccctttcacagagcaggtttgaaacactctttttgtagtgtctataagtgaacatttggcgtgctttcaggcgtaacgtgaaaaaggaaatatcttcccataaaaactagacagaagcattctcagaaacttgttcttgatgtgtcccctctactgagagagttgaacctttctttgcaaagagcagctttgaaacactctttttgtagaatctgcaagaggatatttggatagcttggaggatttcgttggaaacgggtatgtcttcagataaactctagacagaaacattctcagaaacttctttgggatgttgcattcaagtcacagagtagaacattcccatgcatagagcagatttgaaacactctttttgtagtatctggaagtggacatttggagcgctttcaggcctatgttgaaaaaggaaatatcttcccataaaaactagacgggaagcattctcagaaacttatttgtgatgtgtttgctcaactaacaggattgaaccatcgttttgaaggagcagttttgaaacactgttttcgtggaatctgcaagtggatatttggctagctttgaggatttcgttggaaacgggattacatatacaaaggagacagcagcattctcagaaacttctttgtgatgtctgcattcaattcacggagttgagcattccctttcatagagcaggttggaaacactctttttgtagtatctggatgaggacatttggagcgctttcaggcgtatggtgaaaaaggaaatatcttcccgtaaaaactagacagaagcattctcagaagtttatttgtgatgtgtgccctcaactaacagaagttgaacctttcttttgatagagcagttttgaaacactctttttgtaaaatctgcaagaggatatttggatagctttgaggatttcgttgcaaacgggaatggcttcatataaactctagacagaagcattctcagaaacttcgttgggatgtttcgattgaagtcccagtgttgaacattcccttttatagagcaggttggaaaaactctttctgcattccctggaagtggacatttggagcgctttcaggacgacggtgaaaatggaaatatcttccaagaaaatctagatagaagcaacgtcagaatcttttctgtgatggatctactcagctaacagagttgaacctttcttttgagagagcagttttgcaacactctttttgtggaatatgcaagtggatattagggcagctttgaggatttcgttggaaacgggaatacatgtaaaaagcagacagcagcattctcagaaacttctttgtgatgtttgcattgaagtcacagagttgaacattccctttgagagagcaggtttgaaacacgccttttgtcatatctggaagtgtccattcggagcgcattcaggcttgtgttgaaaaaggaaatatcctcccataaaaactagacagaagcattctcagaaacttatctgtgatgtatgtactcaactaacagaactaaaccatcgttttgaaggagcagttttgaaacactctttttgcggaatctgcaagtggatatttggctagctgggaggatttcgttggaaacgggattacatacaaaaagcagacagcagcattctcagaaacttctttgtgatgtttgcattcaagtcacagagttgaacattccctttcatagagcaggtttgaaacactctttttgtagtatctggatgtggacatttggatcgctttcaggcctatggtgaaaaaggaaatatcttcccatgaaaactagacagaagcattctcagaaacttatttgtgatgtgtgccctcaactgacagtgttgaacctttgttttgatagagcagttctgaaacacactttttgtaaaatctgcaagaggatatttggatagcttgaggatttcgttggaaacgggaatgtcttcatgtaaactctacacagaagcattctcagaaactgctttgggatgtttcaattgaagtcccagtgttgaacattccctttcatagagcaggtttgaaacactctttttgtactatctggaagtggacatttggagcgctttcaggtctacggtgaaaaaggagatatcttccaataacaactagatagaagcaatgtcagaacttttttcatgatgtatctactcagcaaacagagttgaacctttcttttgagagagcagttttgaaacactctttttgtggaatatgcaagtgggtattaggccagcttggaggatttcgttggaaacgggaatacgtataaaaagcagacagcagcattgtcagaaactactttgtgatgtttgcattcaagtcacagaattgaacactccctttcacagagcaggtttgaaacactctttttgtagtgtctgtaagtgaacatttggattgctttcaggcctaaggtgaaaaaggaaatatcttcccacaaaaactagacagaagcattctcagaaacttgtttgtgatgtgtgccctctactgacagagttgaaactttctttgcaaagagcagttttgaaacactctttttgtagaatctgcaagaggatatttggatagctttgaggatttcttgggaaacgggaatgtcttcagataaactctagacagaagcattctcagtaaacttctttgggatgtttcaattgaagtcacagtgttgaacattccctttcacagagcaggtttgaaacactctttttgtagtgtctataagtgaacatttggcgtgctttcaggcgtaacgtgaaaaaggaaatatcttcccataaaaactagacagaagcattctcagaaacttgttcttgatgtgtcccctctactgacagagttgaacctttctttgcaaagagcagctttgaaacactctttttgtagaatctgcaagaggatatttggatagcttggaggatttcgttggaaacgggtatgtcttcagataaactctagacagaagcattctcagaaacttctttgggatgttgcattcaagtcacagagtagaacattcccattcatagagcagatttgaaacactctttttgtagtatctggaagtggacatttggagcgctttcaggcctatgttgaaaaaggaaatatcttcccataaaaactagacggaagcattctcagaaacttatttgtgatgtgtttgctcaactaacaggattgaaccatcgttttgaaggagcagttttgaaacactgttttcgtggaatctgcaagtggatatttggctagctttgaggatttcgttggaaatgggattacatacacaaaggagacagcagcattctcagaaacttctttgtgatgtttgcattcaattcacagagttgagcattccctttcatagagcaggttggaaacactctttttgtagtatctggatgtggacatttggatcgctttcaggcctatggtgaaaaaggaaatatcttcccatgaaaactagacagaagcattctcagaaacttatttgtgatgtgtgccctcaactgacagtgttgaacctttgttttgatagagcagttctgaaacacactttttgtaaaatctgcaagaggatatttggatagctttgaggatttcgttggaaacgggaatgtcttcatgtaaactctagacagaagcattctcagaaactgctttgggatgtttcaattgaagtcccagtgttgaacattccctttcatagagcaggtttgaaacactctttttgtactatctggaagtggacatttggagcgctttcaggtctacggtgaaaaaggagatatcttccaataaaaactagatagaagcaatgtcagaacttttttcatgatgtatctactcagcaaacagagttgaacctttcttttgagagagcagttttgaaacactctttttgtggaatatgcaagtgggtattaggccagcttggaggatttcgttggaaacgggaatacgtataaaaagcagacagcagcattgtcagaaactactttgtgatgtttgcattcaagtcacagaattgaacactccctttcacagagcaggtttgaaacactctttttgtagtgtctgtaagtgaacatttggattgctttcaggcctaaggtgaaaaaggaaatatcttcccataaaaactagacagaagcattctcagaaacttgtttgtgatgtgtgccctctactgacagagttgaacctttctttgcaaagagcagttttgaaacactctttttgtagaatctgcaagaggatatttggatagctttgaggatttcttgggaaacgggaatgtcttcagataaactctagacagaagcattctcagaaacttctttgggatgtttcaattgaagtcacagtgttgaacattccctttcacagagcaggtttgaaacactctttttgtagtgtctataagtgaacatttggcgtgctttcaggcctaacgtgaaaaaggaaatatcttcccataaaaactagacaaaagcattctcagaaacttgttcgtgatgtgtgccctctactgacagagttgaacctttctttgcaaagagcagctttgaaacactctttttgtagaatctgccagaggatatttggatagctttgaggatttcgttggaaacgggtatgtcttcagataaactctagacagaagcattctcagaaacttctttgggatgttgcattcaagtcacagagtagaacattcccattcatagagcagatttgaaacactctttttgtagtatctggaagtggacatttggagcgctttcaggcctatgttgaaaaaggaaatatcttcccataaaaacaagacggaagcattctcagaaacttacttgtgatgtgtttgctcaactaacagaattgaaccatcgttttgaaggagcagttttgaaacactgttttcgtggaatctgcaagtggatatttggctagctttgaggatttcgttggaaacgggattacatataaaaaggagacagcagcattctcagaaacttctttgtgatgtctgcattcaagtcacagagttgagcattccctttcatagagcaggttggaaacactctttgtgtagtatctggatgaggacatttggagcgctttcaggcgtatggtgaaaaaggaaatatcttcccgtaaaaactagacagaagcattctcagaaatttatttgtgatgtgtgccctcaactaacagagttgaacctttcttttgatagagcagttttgaaacactctttttgtaaaatctgcaagaggatatttggatagctttgaggatttcgttgcaaacgggaatggcttcatataaactctagacagaagcattctcagaaacttcgttgggatgtttcgattgaagtcccagtgttgaacattcccttttatagagcaggttggaaacactctttctgcattccctggaagtggacatttggagcgctttcaggacgacggtgaaaatggaaatatcttccaagaaaatctagatagaagcaacgtcagaaacttttctgtgatggatctactcagctaacagagttgaacctttcttttgagagagcagttttgcaacactctttttgtggaatatgcaagtggatattagggcagctttgaggatttcgttggaaacgggaatacatgtaaaaagcagacagcagcattctcagaaacttctttgtgatgtttgcattgaagtcacagagttgaacattccctttgagagagcaggtttgaaacacgccttttgtcatatctggaagtgtccattcggagcgcattcaggcttgtgttgaaaaaggaaatatcctcccataaaaactagacagaagcattctcagaaacttatctgtgatgtatgtactcaactaacagaactaaaccatcgttttgaaggagcagttttgaaacactctttttgcggaatctgcaagtggatatttggctagctgggaggatttcgttggaaacgggattacatacaaaaagcagacagcagcattctcagaaacttctttgtgatgtttgcattcaagtcacagagttgaacattccctttcatagagcaggtttgaaacactctttttgtagtatctggatgtggacatttggatcgctttcaggcctatggtgaaaaaggaaatatcttcccatgaaaactagacagaagcattctcagaaacttatttgtgatgtgtgccctcaactgacagtgttgaacctttgttttgatagagcagttctgaaacacactttttgtaaaatctgcaagaggatatttggatagctttgaggatttcgttggaaacgggaatgtcttcatgtaaactctagacagaagcattctcagaaactgctttgggatgtttcaattgaagtcccagtgttgaacattccctttcatagagcaggtttgaaacactctttttgtactatctggaagtggacatttggagcgctttcaggtctacggtgaaaaaggagatatcttccaataaaaactagatagaagcaatgtcagaacttttttcatgatgtatctactcagcaaacagagttgaacctttcttttgagagagcagttttgaaacactccttttgtggaatatgcaagtgggtattaggccagcttggaggatttcgttggaaacgggaatacgtataaaaagcagacagcagcattgtcagaaactactttgtgatgtttgcattcaagtcacagaattgaacactccctttcacagagcaggtttgaaacactctttttgtagtgtctgtaagtgaacatttggattgatttcaggcctgaggtgaaaaaggaaatatcttcccataaaaactagacagaagcattctcagaaacttgtttgtgatgtgtgccctctactgacagagttgaagctttctttgcaaagagcagttttgaaaccctccttttgtagaatctacaagaggatatttggatagctttgaggatttcttgggaaacgggaatgtcttcagataaactctagacagaagcattctcagaaacttctttgggatgtttcaattgaagtcacagtgttgaacattccctttcacagagcaggtttgaaacactctttttgtagtgtctataagtgaacatttggcgtgctttcaggcctaacgtgaaaaaggaaatatcttcccataaaaactagacagaagcattctcagaaacttgttcgtgatgtgtgccctctactgacagagttgaacctttctttgcaaagagcagctttgaaacactctgtttgtagaatctgcaagaggatatttggatagctttgaggatttcgttggaaacgggtatgtcttcagataaactctagacagaagcattctcagaaacttctttgggatgttgcattcaagtcacagagtagaacattcccattcatagagcagatttgaaacactctttttgtagtatctggaagtggacatttggagcgctttcaggcctatgttgaaaaaggaaatatcttcccataaaaactagacggaagcattctcagaaacttacttgtgatgtgtttgctcaactaacagaattgaaccatcgttttgaaggagcagttttgaaacactgttttcgtggaatctgcaagtggatatttggctagctttgaggatttcgttggaaacgggattacatataaaaaggagacagcagcattctcagaaacttctttgtgatgtctgcattcaagtcacagagttgagcattccctttcatagagcaggttggaaacactctttttgtagtatctggatgaggacatttggagcgctttcaggcgtatggtgaaaaaggaaatatcttcccgtaaaaactagacagaagcattctcagaaatttatttgtgatgtgtgccctcaactaacagagttgaagctttcttttgatagagcagttttgaaagactctttttgtaaaatctgcaagaggatatttggatagctttgaggatttcattgcaaacgggaatggcttcatataaactctagacagaagcattctcagaaacttcgttgggatgtttcgattgaagtcccagtgttgaacattcccttttatagagcaggttggaaacactctttctgcattccctggaagtggacatttggagcgctttcaggacgacggtgaaaatggaaatatcttccaagaaaatctagatagaagcaacgtcagaaacttttatgtgatggatctactcagctaacagagttgaacctttcttttgagagagcagttttgcaacactctttttgtggaatatgcaagtggatattagggcagctttgaggatttcgttggaaacgggaatacatgtaaaaagcagacagcagcgttctcagaaacttctttgtgatgtttgcattgaagtcacagagttgaacattccctttgagagagcaggtttgaaacacgccttttgtcatatctggaagtgtccattcggagcgcattcaggcttgtgttgaaaaaggaaatatcctcccataaaaactagacagaagcattctcagaaacttatctgtgatgtatgtactcaactaacagaactaaaccatcgttttgaaggagcagttttgaaacactctttttgcggaatctgcaagtggatatttggctagctgggaggatttcgttggaaacgggattacatacaaaaagcagacagcagcattctcagaaacttctttgtgatgtttgcattcaagtcacagagttgaacattccctttcatagagcaggtttgaaacactctttttgtagtatctggatgtggacatttggatcgctttcaggcctatggtgaaaaaggaaatatcttcccatgaaaactagacagaagcattctcagaaacttatttgtgatgtgtgccctcaactgacagtgttgaacctttgttttgatagagcagttctgaaacacactttttgtaaaatctgcaagaggatatttggatagctttgaggatttcgttggaaacgggaatgtcttcatgtaaactctacacagaagcattctcagaaactgctttgggatgtttcaattgaagtcccagtgttgaacattcccattcatagagcaggtttgaaacactctttttgtactatctggaagtggacatttggagcgctttcaggtctacggtgaaaaaggagatatcttccaataaaaactagatagaagcaatgtcagaacttttttcatgatgtatctactcagcaaacagagttgaacctttcttttgagagagcagttttgaaacactctttttgtggaatatgcaagtgggtattaggccagcttggaggatttcgttggaaacgggaatacgtataaaaagcagacagcagcattgtcagaaactactttgtgatgtttgcattcaagtcacagaattgaacactccctttcacagagcaggtttgaaacactctttttgtagtgtctgtaagtgaacatttggattgctttcaggcctaaggtgaaaaaggaaatatcttcccataaaaactagacagaagcattctcagaaacttgtttgtgatgtgtgccctctactgacagagttgaacctttctttgcaaagagcagttttgaaacactctttttgtagaatctgcaagaggatatttggatagctttgaggatttcttgggaaacgggaatgtcttcagataaactctagacagaagcattctcagaaacttctttgggatgtttcaattgaagtcacagtgttgaacattccctttcacagagcaggtttgaaacactctttttgtagtgtctataagtgaacatttggcgtgctttcaggcgtaacgtgaaaaaggaaatatcttcccataaaaactagacagaagcattctcagaaacttgttcttgatgtgtcccctctactgacagagttgaacctttctttgcaaagagcagctttgaaacactctttttgtagaatctgcaagaggatatttggatagcttggaggatttcgttggaaacgggtatgtcttcagataaactctagacagaagcattctcagaaacttctttgggatgttgcattcaagtcacagagtagaacattcccattcatagagcagatttgaaacactctttttgtagtatctggaagtggacatttggagcgctttcaggcctatgttgaaaaaggaaatatcttcccataaaaactagacggaagcattctcagaaacttatttgtgatgtgtttgctcaactaacaggattgaaccatcgttttgaaggagcagttttgaaacactgttttcgtggaatctgcaagtggatatttggctagctttgaggatttcgttggaaacgggattacatataaaaaggagacagcagcattctcagaaacttctttgtgatgtctgcattcaattcacagagttgagcattccctttcatagagcaggttggaaacactctttttgtagtatctggatgaggacatttggagcgctttcaggcgtatggtgaaaagggaaatatcttcccgtaaaaactagacagaagcattctcagaagtttatttgtgatgtgtgccctcaactaacagagttgaacctttcttttgatagagcagttttgaaacactctttttgtaaaatctgcaagaggatatttggatagctttgaggatttcgttgcaaacgggaatggcttcatataaactctagacagaagcattctcagaaacttcgttgggatgtttcgattgaagtcccagtgttgaacattcccttttatagagcaggttggaaacactctttctgcattccctggaagtggacatttggagcgctttcaggacgacggtgaaaatggaaatatcttccaagaaaatctagatagaagcaatgtcagaaacttttatgtgatggatctactcagctaacagagttgaacctttcttttgagagagcagttttgcaacactctttttgtggaatatgcaagtggatattagggcagctttgaggatttcgttggaaacgggaatacatgtaaaaagcagacagcagcattctcagaaacttctttgtgatgtttgcattgaagtcacagagttgaacattccctttgagagagcaggtttgaaacacgccttttgtcatatctggaagtgtccattcggagcgcattcaggcttgtgttgaaaaaggaaatatcctcccataaaaactagacagaagcattctcagaaacttatctgtgatgtatgtactcaactaacagaactaaaccatcgttttgaaggagcacttttgaaacactctttttgcggaatctgcaagtggatatttggctagctgggaggatttcgttggaaacgggattacatacaaaaagcagacagcagcattctcagaaacttctttgtgatgtttgctttcaagtcacagagttgagcattccctttcatagagcaggttggaaacactctttttgtagtatctggatgtggacatttggatcgctttcaggcctatggtgaaaaaggaaatatcttcccatgaaaactagacagaagcattctcagaaacttatttgtgatgtgtgccctcaactgacagtgttgaacctttgttttgatagagcagttctgaaacacactttttgtaaaatctgcaagaggatatttggatagctttgaggatttcgttggaaacgggaatgtcttcatgtaaactctagacagaagcattctcagaaactgctttgggatgtttcaattgaagtcccagtgttgaacattccctttcatagagcaggtttgaaacactctttttgtactatctggaagtggacattcggagcgctttcaggtctacggtgaaaaaggagatatcttccaataacaactagatagaagcaatgtcagaacttttttcatgatgtatctactcagcaaacagagttgaacctttcttttgagggagcagttttgaaacactatttttgtggaatatgcaagtgggtattaggccagcttggaggatttcgttggaaacgggaatacgtataaaaagcagacagcagcattgtcagaaactactttgtgatgtttgcattcaagtcacagaattgaacactccctttcacagagcaggtttgaaactctctttttgtagtgtctataagtgaacatttggcgtgctttcaggcgtaacgtgaaaaaggaaatatcttcccataaaaactagacagaagcattctcagaaacttgtttgtgatgtgtgccctctactgacagagttgaacctttctttgcaaagagcagttttgaaacactctttttgtagaatctgcaagaggatatttggatagctttgaggatttcttgggaaacgggaatgtcttcagataaactctagacagaagcattctcagaaacttctttgggatgtttcaattgaagtcacagtgttgaacattccctttcacagagcaggtttgaaacactctttttgtagtgtctataagtgaacatttggcgtgctttcaggcctaacgtgaaaaaggaaatatcttcccataaaaactagacagaagcattctcagaaacttgttcgtgatgtgtgccctctactgacagagttgaacctttctttgcaaagagcagctttgaaacacactttttgtagaatctgcaagaggatatttggatagctttgaggatttcgttggaaacgggtatgtcttcagatgaaccctagacagaagcattctcagaaacttctttgggatgttgcatgcaagtcacagagtagaacattcccattcatagagcagatttgaaacactctttttgtagtatctggaagtggacatttggagcgctttcaggcctatgttgaaaaaggaaatatcttcccataaaaactagacggaagcattctcagaaacttatttgtgatgtgtttgctcaactaacaggattgaaccatccttttgaaggagcagttttgaaacactgttttcgtggaatctgcaagtggatatttggctagctttgaggatttcgttggaaacgggattacatataaaaaggagacagcagcattctcagaaacttctttgtgatgtctgcattcaattcacagagttgagcattccctttcatagagcaggttggaaacactctttttgtagtatctggatgtggacatttggatcgctttcaggcctatggtgaaaaaggaaatatcttcccatgaaaactagacagaagcattctcagaaacttatttgtgatgtgtgcactcaactgacagtgttgaacctttgttttgatagagcagttctgaaacacactttttgtaaaatctgcaagaggatatttggatagctttgaggatttcgttggaaacgggaatgtcttcatgtaaactctagacagaagcattctcagaaactgctttgggatgtttcaattgaagtcccagtgttgaacattcccattcatagagcaggtttgaaacactctttttctactatctggaagtggacatttggagcgctttcaggtctacggtgaaaaaggagatatcttccaataaaaactagatagaagcaatgtcagaacttttttcatgatgtatctactcagcaaacagagttgaacctttcttttgagagagcagttttgacactgtctttgtggaatatgcaagtgggtattaggccagcttggaggatttcgttggaaacgggaatacgtataaaaagcagacagcagcattgtcagaaactactttgtgatgtttgcattcaagtcacagaattgaacactccctttcacagagcaggtttgaaacactctttttgtagtgtctgtaagtgaacatttggattgctttcaggcctaaggtgaaaaaggaaatatcttcccataaaaactagacagaagcattctcagaaacttgtttgtgatgtgtgccctctactgacagagttgaacctttctttgcaaagagcagttttgaaacactctttttgtagaatctgcaagaggatatttggatagctttgaggatttcttgggaaacgggaatgtcttcagataaactctagacagaagcattctcagaaacttctttgggatgtttcaattgaagtcacagtgttgaacattccctttcacagagcaggtttgaaacactctttttgtagtgtctataagtgaacatttggcgtgctttcaggcctaacgtgaaaaaggaaatatcttcccataaaaactagacagaagcattctcagaaacttgttcatgatgtgtgccctctactgacagagttgaacctttctttgcaaagagcagctttgaaacactctttttgtagaatctgcaagaggatatttggatagctttgaggatttcgttggaaacgggtatgtcttcagataaactctagacagaagcattctcagaaacttctttgggatgttgcattcaagtcacagagtagaacattcccattcatagagcagatttgaaacactctttttgtagtatctggaagtggacatttggagcgctttcaggcctatgttgaaaaaggaaatatcttcccataaaaactagacggaagcattctcagaaacttacttgtgatgtgtttgctcaactaacagaattgaaccatcgttttgaaggagcagttttgaaacactgttttcgtggaatctgcaagtggatatttggctagctttgaggatttcgttggaaacgggattacatatacaaaggagacagcagcattctcagaaacttctttgtgatgtctgcattcaattcacagagttgagcattccctttcatagagcaggttggaaacactctttttgtagtatctggatgaggacatttggagcgctttcaggcctatggtgaaaaaggaaatatcttcccgtaaaaactagacagaagcattctcagaaatttatttgtgatgtgtgccctcaactaacagagttgaacctttcttttgatagagcagttttgaaacactctttttgtaaaatctgcaagaggatatttggatagctttgaggatttcattgcaaacgggaatggcatcatataaactctagacagaagcattctcagaaacttcgttgggatgtttcgattgaagtcccagtgttgaacattcccttttatagagcaggttggaaacactctttctgcattccctggaagtggacctttggagcgctttcaggacgacggtgaaaatggaaatatcttccaataaaatctagatagaagcaacgtcagaaacttttatgtgatggatctactcagctaacagagttgaacctttcttttgagagagcagttttgcaacactctttttgtggaatatgcaagtggatattagggcagctttgaggatttcgttggaaacgggaatacatgtaaaaaacagacagcagcattctcagaaacttctttgtgatgtttgcattgaagtcacagagttgaacattccctttgagagagcaggtttgaaacacgccttttgtcatatctggaagtgtccattcggagcgcattcaggcttgtgttgaaaaaggaaatatcctcccataaaaactagacagaagcattctcagaaacttatttgtgatgtatgtactcaactaacagaactaaaccatcgttttgaaggagcagttttgaaacactctttttgcggaatctgcaagtggatatttggctagctgggaggatttcgttggaaacgggattacataaaaaagcagacagcagcattctcagaaacttctttgtgatgtttgcattcaagtcgcagagttgaacattccctttcatagagcaggtttgaaacactctttttgtagtatctggatgtggacatttggatcgctttcaggcctatggtgaaaaaggaaatatcttcccatgaaaactagacagaagcattctcagaaacttatttgtgatgtgtgccctcaactgacagtgttgaacctttgttttgatagagcagttctgaaacacactttttgtaaaatctgcaagaggatatttggatagctttgaggatttcgttggaaacgggaatgtcttcatgtaaactctagacagaagcattctcagaaactgctttgggatgtttcaattgaagtcccagtgttgaacattccctttcatagagcaggtttgaaacactctttttgtagtatctggaagtggacatttggagcgctttcaggtctacggtgaaaagggagatatcttccaataaaaactagatagaagcaatgtcagaacttttttcatgatgtatctactcagcaaacagagttgaacctttcttttgagagagcagttttgaaacactctttttgtggaatatgcaagtgggtattaggccagcttgaaggatttcgttggaaacgggattacgtataaaaagcagacagcagcattgtcagaaactactttgtgatgtttgcattcaagtcacagaattgaacactccctttcacagagccggtttgaaacactctttttgtagtgtctgtaagtgaacatttggattgctttcaggcctaaggtgaaaaaggaaatatcttcccataaaaactagacagaagcattctcagaaacttgtttgtgatgtgtgccctctactgacagagttgaacctttctttgcaaagagcagttttgaaacactctttttgtagaatctgcaagaggatatttggatagctttgaggatttcttgggaaacgggaatgtcttcagataaactctagacagaagcattctcagaaacttctttgggatgtttcaattgaagtcacagtgttgaacattccctttcacagagcaggtttgaaacactctttttgtagtgtctataattgaacatttggcgtgctttcaggcctaacgtgaaaaaggaaatatcttcccataaaaactagacagaagcattctcagaaacttgttcgtgatgtgtgccctctactgacagagttgaacctttctttgcaaagagcagctttgaaacactctttttgtagaatctgcaagaggatatgtggatagctttgaggatttcgttggaaacgggtatgtcttcagataaactctagacagaagcattctcagaaacttctttgggatgtttcaattgaagtcacagtgttgaacattccctttcacagagcaggtttgaaacactctttttgtagtgtctataagtgaacatttggcgtgctttcaggcctaacgtgaaaaaggaaatatcttcccataaaaactagacagaagcattctcagaaacttgttcatgatgtgtgccctctactgacagagttgaacctttctttgcaaagagcagctttgaaacactctttttgtagaatctgcaagaggatatttggatagctttgaggatttcgttggaaacgggtatgtcttcagataaactctagacagaagcattctcagaaacttctttgggatgttgcattcaagtcacagagtagaacattcccattcatagagcagatttgaaacactctttttgtagtatctggaagtggacatttggagcgctttcaggcctatgttgaaaaaggaaatatcttcccataaaaactagacggaagcattctcagaaacttacttgtgatgtgtttgctcaactaacagaattgaaccatcgttttgaaggagcagttttgaaacactgttttcgtggaatctgcaagtggatatttggctagctttgaggatttcgttggaaacgggattacatataaaaaggagacagcagcattctcagaaacttctttgtgatgtctgcattcaagtcacagagttgagcattccctttcatagagcaggttggaaacactctttttgtagtatctggatgaggacatttggagcgctttcaggcgtatggtgaaaaaggaaatatcttcccgtaaaaactagacagaagcattctcagaaatttatttgtgatgtgtgccctcaactaacagagttgaacctttcttttgatagagcagttttgaaacactctttttgtaaaatctgcaagaggatatttggatagctttgaggatttcgttgcaaacgggaatggcttcatataaactctagacagaagcattctcagaaacttcgttgggatgtttcgattgaagtcccagtgttgaacattcccttttatagagcaggttggaaacactctttctgcattccctggaagtggacatttggagcgctttcaggacgacggtgaaaatggaaatatcttccaagaaaatctagatagaagcaacgtcagaaacttttctgtgatggatctactcagctaacagagttgaacctttcttttgagagagcagttttgcaacactctttttgtggaatatgcaagtggatattagggcagctttgaggatttcgttggaaacgggaatacatgtaaaaagcagacagcagcattctcagaaacttctttgtgatgtttgcattgaagtcacagagttgaacattccctttgagagagcaggtttgaaacacgccttttgtcatatctggaagtgtccattcggagcgcattcaggcttgtgttgaaaaaggaaatatcctcccataaaaactagacagaagcattctcagaaacttatctgtgatgtatgtactcaactaacagaactaaaccatccttttgaaggagcagttttgaaacactctttttgcggaatctgcaagtggatatttggctagctgggaggatttcgttggaaacgggattacatacaaaaagcagacagcagcattctcagaaacttctttgtgatgtttgcattcaagtcacagagttgaacattccctttcatagagcaggtttgaaacactctttttgtagtatctggatgtggacatttggatcgctttcaggcctatggtgaaaaaggaaatatcttcccatgaaaactagacagaagcattctcagaaacttatttgtgatgtgtgccctcaactgacagtgttgaacctttgttttgatagagcagttctgaaacacactttttgtaaaatctgcaagaggatatttggatagctttgaggatttcgttggaaacgggaatgtcttcatgtaaactctacacagaagcattctcagaaactgctttgggatgtttcaattgaagtcccagtgttgaacattcccattcatagagcagttttgaaacactctttttgtactatctggaagtggacatttggagcgctttcaggtctacggtgaaaaaggagatatcttccaataaaaactagatagaagcaatgtcagaacttttttcatgatgtatctactcagcaaacagagttgaacctttcttttgagagagcagttttgaaacactctttttgtggaatatgcaagtgggtattaggccagcttggaggatttcccttggaaacgggaatacgtataaaaagcagacagcagcattgtcagaaactactttgtgatgtttgcattcaagtcacagaattgaacactccctttcacagagcaggtttgaaacactctttttgtagtgtctgtaagtgaacatttggattgctttcaggcctaaggtgaaaaaggaaatatcttcccataaaaactagacagaagcattctcagaaacttgtttgtgatgtgtgccctctactgacagagttgaacctttctttgcaaagagcagttttgaaacactctttttgtagaatctgcaagaggatatttggatagctttgaggatttcttgggaaacgggaatgtcttcagataaactctagacagaagcattctcagaaacttctttgggatgtttcaattgaagtcacagtgttgaacattccctttcacagagcaggtttgaaacactctttttgtagtgtgtataagtgaacatttggcgtgctttcaggcctaacgtgaaaaaggaaatatcttcccataaaaactagacagaagcattctcagaaacttgttcgtgatgtgtgccctctactgacagagttgaacctttctttgcaaagagcagctttgaaacacactttttgtagaatctgcaagaggatatttggatagctttgaggatttcgttggaaacgggtatgtcttcagataaactctagacagaagcattctcagaaacttctttgggatgttgcattcaagtcacagagtagaacattcccattcatagagcagatttgaaacactctttttgtagtatctggaagtggacatttggagcgctttcaggcctatgttgaaaaaggaaatatcttcccataaaaactagacggaagcattctcagaaacttacttgtgatgtgtttgctcaactaacagaattgaaccatcgttttgaaggagcagttttgaaacactgttttcgtggaatctgcaagtggatatttggctagctttgaggatttcgttggaaacgggattacatataaaaaggagacagcagcattctcagaaacttctttgtgatgtctgcattcaattcacagagttgagcattccctttcatagagcaggttggaaacactctttttgtagtatctggatgaggacatttggagcgctttcaggcgtatggtgaaaaaggaaatatcttcccgtaaaaactagacagaagcattctcagaaatttatttgtgatgtgtgccctcaactaacagagttgaacctttcttttgatagagcagttttgaaacactctttttgtaaaatctgcaagaggatatttggatagctttgaggatttcgttgcaaacgggaatggcttcatataaactctagacagaagcattctcagaaacttcgttgggatgtttcgattgaagtcccagtgttgaacattcccttttatagagcaggttggaaacactctttctgcattccctggaagtggacatttggagcgctttcaggacgacggtgaaaatggaaatatcttccaataaaatctagatagaagcaacgtcagaaacttttatgtgatggatctactcagctaacagagttgaacctttcttttgagagagcagttttgcaacactctttttgtggaatatgcaagtggatattagggcagctttgaggatttcgttggaaacgggaatacatgtaaaaagcagacagcagcattctcagaaacttctttgtgatgtttgcattgaagtcacagagttgaacattccctttgagagagcaggtttgaaacacaccttttgtcatatctggaagtgtccattcggagcgcattcaggcttgtgttgaaaaaggaaatatcctcccataaaaactagacagaagcattctcagaaacttatctgtgatgtatgtactcaactaacagaactaaaccgtcgttttgaagggcagttttgaaacactctttttgaggaatctgcaagtggatatttggctagctgggaggatttcgttggaaacgggattacatacaaaaagcagacagcagcattctcagaaacttctttgtgatgtttgcattcaagtcacagagttgaacattccctttcatagagcaggtttgaaacactctttttgtagtatctggatgtggacatttggatcgctttcaggcctatggtgaaaaaggaaatatcttcccatgaaaactagacagaagcattctcagaaacttatttgtgatgtgtgccctcaactgacagtgttgaacctttgttttgatagagcagttctgaaacacactttttgtaaaatctgcaagaggatatttggatagctttgaggatttcgttggaaacgggaatgtcttcatgtaaactctacacagaagcattctcagaaactgctttgggatgtttcaattgaagtcccagtgttgaacattccctttcatagagcaggtttgaaaccctctttttgtactatctggaagtggacatttggagcgctttcaggtctacggtgaaaaaggagatatcttccaataaaaactagatagaagcaatgtcagaacttttttcatgatgtatctactcagcaaacagagttgaacctttcttttgagagagcagttttgaaacactccttttgtggaatatgcaagtgggtattaggccagcttggaggatttcgttggaaacgggaatacgtataaaaagcagacagcagcattgtcagaaactactttgtgatgtttgcattcaagtcacagaattgaacactccctttcacagagcaggtttgaaactctctttttgtagtgtctataagtgaacatttggcgtgctttcaggcgtaacgtgaaaaaggaaatatcttcccataaaaactagacagaagcattctcagaaacttgttcgtgatgtgtgccctctactgacagagttgaacctttctttgcaaagagcagttttgaaacactctttttgtagaatctgcaagaggatatttggatagctttgaggatttcttgggaaacgggaatgtcttcagataaactctagacagaagcattctcagaaacttctttgggatgtttcaattgaagtcacagtgttgaacattccctttcacagagcaggtttgaaacactctttttgtagtgtctataattgaacatttggcgtgctttcaggcctaacgtgaaaaaggaaatatcttcccataaaaactagacagaagcattctcagaaacttgttcgcgatgtgtgccctctactgacagagttgaacctttctttgcaaagagcagctttgaaacactctttttgtagaatctgcaagaggatatgtggatagcttttaggatttcgttggaaacgggtatgtcttcagataaactctagacagaagcattctcagaaacttctttgggatgtttcaattgaagtcacagtgttgaacattccctttcacagagcaggtttgaaacactctttttgtagtgtctataagtgaacatttggcgtgctttcaggcctaacgtgaaaaaggaaatatcttcccataaaaactagacagaagcattctcagaaacttgttcttgatgtgtcccctctactgacagagttgaacctttctttgcaaagagcagctttgaaacactctttttgtagaatctgcaagaggatatttggatagctttgaggatttcgttggaaacgggtatgtcttcagataaactctagacagaagcattctcagaaacttctttgggatgttgcattcaagtcacagagtagaacattcccattcatagagcagatttgaaacactctttttgtagtatctggaagtggacatttggagcgctttcaggcctatgttgaaaaaggaaatatcttcccataaaaactagacggaagcattctcagaaacttatttgtgatgtgtttgctcaactaacaggattgaaccatcgttttgaaggagcagttttgaaacactgttttcgtggaatctgcaagtggatatttggctagctttgaggatttcgttggaaacgggattacatatacaaaggagacagcagcattctcagaaacttctttgtgatgtctgcattcaattcacagagttgagcattccctttcatagagcaggttggaaacactctttttgtagtatctggatgaggacatttggagcgctttcaggcgtatggtgaaaagggaaatatcttcccgtaaaaactagacagaagcattctcagaagtttatttgtgatgtgtgccctcaactaacagagttgaacctttcttttgatagagcagttttgaaacactctttttgtaaaatctgcaagaggatatttggatagctttgaggatttcgttgcaaacgggaatggcttcatataaactctagacagaagcattctcagaaacttcgttgggatgtttcgattgaagtcccagtgttgaacattcccttttatagagcaggttggaaacactctttctgcattccctggaagtggacatttggagcgctttcaggacgacggtgaaaatggaaatatcttccaagaaaatctagatagaagcaacgtcagaaacttttatgtgatggatctactcagctaacagagttgaacctttcttttgagagagcagttttgcaacactctttttgtggaatatgcaagtggatattagggcagctttgaggatttcgttggaaacgggaatacatgtaaaaagcagacagcagcattctcagaaacttctttgtgatgtttgcattgaagtcacagagttgaacattccctttgagagagcaggtttgaaacacgccttttgtcatatctggaagtgtccattcggagcgcattcaggcttgtgttgaaaaaggaaatatcctcccataaaaactagacagaagcattctcagaaacttatctgtgatgtatgtactcaactaacagaactaaaccatcgttttgaaggagcagttttgaaacactctttttgcggaatctgcaagtggatatttggctagctgggaggatttcgttggaaacgggattacatacaaaaagcagacagcagcattctcagaaacttctttgtgatgtttgcattcaagtcacagagttgaacattccctttcatagagcaggtttgaaacactctttttgtagtatctggatgtggacatttggatcgctttcaggcctatggtgaaaaaggaaatatcttcccatgaaaactagacagaagcattctcagaaacttatttgtgatgtgtgccctcaactgacagtgttgaacctttgttttgatagagcagttctgaaacacactttttgtaaaatctgcaagaggatatttggatagctttgaggatttcgttggaaacgggaatgtcttcatgtaaactctagacagaaagcattctcagaaactgctttgggatgtttcaattgaagtcacagtgttgaacattccctttcatagagcaggtttgaaacactctttttgtagtatctggaagtggacatttggagcgctttcaggtctgcggtgaaaaaggagatatcttccaatgaaaactagatagaagcaatgtcagaacttttttcatgatgtatctactcagcaaacagagttgaacctttcttttgagagagcagttttgaaacactctttttgtggaatatgcaagtgggtattaggccagcttggaggatttcgttggaaacgggaatacgtataaaaagcagacagcagcattgtcagaaactactttgtgatgtttgcattcaagtcacagaattgaacactccctttcacagagcaggtttgaaacactctttttgtagtgtctgtaagtgaacatatggattgctttcaggcctaaggtgaaaaaggaaatatcttcccataaaaactagacagaagcattctcagaaacttgtttgtgatgtgtgccctctactgacagagttgaacctttctttgcaaagaccagttttgaaacactctttttgtagaatctgcaagaggatatttggatagctttgaggatttcttgggaaacgggaatgtcttcagataaactctagacagaagcattctcagaaacttctttgggatgtttcaattgaagtcacagtgttgaacattccctttcacagagcaggtttgaaacactctttttgtagtgtctataagtgaacatttggcgtgctttcaggcctaacgtgaaaaaggaaatatcttcccataaaaactagacagaagcattctcagaaacttgttcgtgatgtgtgccctctactgacagagttgaacctttctttgcaaagagcagctttgaaacacactttttgtagaatctgcaagaggatatttggatagcttggaggatttcgttggaaacgggtatgtcttcagataaactctagacagaagcattctcagaaacttctttgggatgttgcattcaagtcacagagtagaacattcccattcatagagcagatttgaaacactctttttgtagtatctggaagtggacatttggagcgctttcaggcctatgttgaaaaaggaaatatcttcccataaaaactagacggaagcattctcagaaacttatttgtgatgtgtttgctcaactaacaggattgaaccatcgttttgaaggagcagttttgaaacactgttttcgtggaatctgcaagtggatatttggctagctttgaggatttcgttggaaacgggattacatataaaaaggagacagcagcattctcagaaacttctttgtgatgtctgcattcaagtcacagagttgagcattccctttcatagagaaggttggaaacactctttttgtagtatctggatgaggacatttggagcgctttcaggcgtatggtgaaaaaggaaatatcttcccgtaaaaactagacagaagattctcagaaatttatttgtgatgtgtgccctcaactaacagagttgaacctttcttttgatagagcagttttgaaacactctttttgtaaaatctgcaagaggatatttggatagctttgaggatttcgttgcaaacgggaatggcttcatataaactctagacagaagcattctcagaaacttcgttgggatgtttcgattgaagtcccagtgttgaacattcccttttatagagcaggttggaaacactctttctgcattccctggaagtggacatttggagcgctttcaggacgacggtgaaaatggaaatatcttccaagaaaatctagatagaagcaacgtcagaaacttttctgtgatggatctactcagctaacagagttgaacctttcttttgagagagcagttttgcaacactctttttgtggaatatgcaagtggatattagggcagctttgaggatttcgttggaaacgggaatacatgtaaaaagcagacagcagcattctcagaaacttctttgtgatgtttgcattgaagtcacagagttgaacattccctttgagagagcaggtttgaaacacgccttttgtcatatctggaagtgtccattcggagcgcattcaggcttgtgttgaaaaaggaaatatcctcccataaaaactagacagaagcattctcagaaacttatctgtgatgtatgtactcaactaacagaactaaaccatcgttttgaaggagcagttttgaaacactctttttgcggaatctgcaagtggatatttggctagctgggaggatttcgttggaaacgggattacatacaaaaagcagacagcagcattctcagaaacttctttgtgatgtttgcattcaagtcacagagttgaacattccctttcatagagcaggtttgaaacactctttttgtagtatctggatgtggacatttggatcgctttcaggcctatggtgaaaaaggaaatatcttcccatgaaaactagacagaagcattctcagaaacttatttgtgatgtgtgccctcaactgacagtgttgaacctttgttttgatagagcagttctgaaacacactttttgtaaaatctgcaagaggatatttggatagctttgaggatttcgttggaaacgggaatgtcttcatgtaaactctacacagaagcattctcagaaactgctttgggatgtttcaattgaagtcccagtgttgaacattcccattcatagagcaggtttgaaacactctttttgtactatctggaagtggacatttggagcgctttcaggtctacggtgaaaaaggagatatcttccaataaaaactagatagaagcaatgtcagaacttttttcatgatgtatctactcagcaaacagagttgaacctttcttttgagagagcagttttgaaacactctttttgtggaatatgcaagtgggtattaggccagcttggaggatttcgttggaaacgggaatacgtataaaaagcagacagcagcattgtcagaaactactttgtgatgtttgcattcaagtcacagaattgaacactccctttcacagagcaggtttgaaacactctttttgtagtgtctgtaagtgaacatatggattgctttcaggcctaaggtgaaaaaggaaatatcttcccataaaaactagacagaagcattctcagaaacttgtttgtgatgtgtgccctctactgacagagttgaacctttctttgcaaagagcagttttgaaacactctttttgtagaatctgcaagaggatatttggatagctttgaggatttcttgggaaacgggaatgtcttcagataaactctagacagaagcattctcagaaacttctttgggatgtttcaattgaagtcacagtgttgaacattccctttcacagagcaggtttgaaacactctttttgtagtgtctataagtgaacatttggcgtgctttcaggcctaacgtgaaaaaggaaatatcttcccataaaaactagacagaagcattctcagaaacttgttcgtgatgtgtgccctctactgacagagttgaacctttctttgcaaagagcagctttgaaacacactttttgtagaatctgcaagaggatatttggatagcttggaggatttcgttggaaacgggtatgtcttcagataaactctagacagaagcattctcagaaacttctttgggatgttgcattcaagtcacagagtagaacattcccattcatagagcagatttgaaacactctttttgtagtatctggaagtggacatttggagcgctttcaggcctatgttgaaaaaggaaatatcttcccataaaaactagacggaagcattctcagaaacttatttgtgatgtgtttgctcatctaacaggattgaaccatcgttttgaaggagcagttttgaaacactgttttcgtggaatctgcaagtggatatttggctagctttgaggatttcgttggaaacgggattacatatacaaaggagacagcagcattcctcagaaacttctttgtgatgtctgcattcaattcacagagttgagcattccctttcatagagcaggttggaaacactctttttgtagtatctggatgaggacatttggagcgctttcaggcgtatggtgaaaaaggaaatatcttcccgtaaaaactagacagaagattctcagaaatttatttgtgatgtgtgccctcaactaacagagttgaacctttcttttgatagagcagttttgaaacactctttttgtaaaatctgcaagaggatatttggatagctttgaggatttcgttgcaaacgggaatggcttcgtataaactctagacagaagcattctcagaaacttcgttgggatgtttcgattgaagtcccagtgttgaacattcccttttatagagcaggttggaaacactctttctgcattccctggaagtggacatttggagcgctttcaggacgacggtgaaaatggaaatatcttccaagaaaatctagatagaagcaacgtcagaaacttttatgtgatggatctactcagctaacagagttgaacctttcttttgagagagcagttttgcaacactctttttgtggaatatgcaagtggatattagggcagctttgaggatttcgttggaaacgggaatacatgtaaaaagcagacagcagcattctcagaaacttctttgtgatgtttgcattgaagtcacagagttgaacattccctttgagagagcaggtttgaaacacgccttttgtcatatctggaagtgtccattcggagcgcattcaggcttgtgttgaaaaaggaaatatcctcccataaaaactagacagaagcattctcagaaacttatctgtgatgtatgtactcaactaacagaactaaaccatcgttttgaagggcagtttagaaacactctttttgcggaatctgcaagtggatatttggctagctgggaggatttcgttggaaacgggattacatacaaaaagcagacagcagcattctcagaaacttctttgtgatgtttgcattcaagtcacagagttgaacattccctttcatagagcaggtttgaaacactctttttgtagtatctggatgtggacatttggatcgctttcaggcctatggtgaaaaaggaaatatcttcccatgaaaactagacagaagcattctcagaaacttatttgtgatgtgtgccctcaactgacagtgttgaacctttgttttgatagagcagttctgaaacacactttttgtaaaatctgcaagaggatatttggatagctttgaggatttcgttggaaacgggaatgtcttcatgtaaactctagacagaagcattctcagaaactgctttgggatgtttcaattgaagtcccagtgttgaacattccctttcatagagcaggtttgaaacactctttttgtactatctggaagtggacatttggagcgctttcaggtctacggtgaaaaaggagatatcttccaataaaaactagatagaagcaatgtcagaacttttttcatgatgtatctactcagcaaacagagttgaacctttcttttgagggagcagttttgaaacactatttttgtggaatatgcaagtgggtattaggccagcttggaggatttcgttggaaacggtaatacgtataaaaagcagacagcagcattgtcagaaactactttgtgatgtttgcattcaagtcacagaattgaacactccctttcacagagcaggtttgaaacactctttttgtagtgtctgtaagtgaacatttggattgctttcaggcctaaggtgaaaaaggaaatatcttcccataaaaactagacagaagcattctcagaaacttgtttgtgatgtgtgccctctactgacagagttgaacctttctttgcaaagagcagttttgaaacactctttttgtagaatctgcaagaggatatttggatagctttgaggatttcttgggaaacgggaatgtcttcagataaactctagacagaagcattctcagaaacttctttgggatgtttcaattgaagtcacagtgttgaacattccctttcacagagcaggtttgaaacactctttttgtagtgtctataagtgaacatttggcgtgctttcaggcgtaacgtgaaaaaggaaatatcttcccataaaaaccagacagaagcattctcagaaacttgttcgtgatgtgtgccctctactgacagagttgaacctttctttgcaaagagcagctttgaaacacactttttgtagaatctgcaagaggatatttggatagcttggaggatttcgttggaaacgggtatgtcttcagataaactctagacagaagcattctcagaaacttctttgggatgttgcattcaagtcacagagtagaacattcccattcatagagcagatttgaaacactctttttgtagtatctggaagtggacatttggagcgctttcaggcctatgttgaaaaaggaaatatcttcccataaaaactagacggaagcattctcagaaacttatttgtgatgtgtttgctcaactaacaggattgaaccatcgttttgaaggagcagttttgaaacactgttttcgtggaatctgcaagtggatatttggctagctttgaggatttcgttggaaacgggattacatatacaaaggagacagcagcattctcagaaacttctttgtgatgtctgcattcaattcacagagttgagcattccctttcatagagcaggttggaaacactctttttgtagtatctggatgaggacatttggagcgctttcaggcgtatggtgaaaaaggaaatatcttcccgtaaaaactagacagaagcattctcagaagtttatttgtgatgtgtgccctcaactaacagagttgaacctttcttttgatagagcagttttgaaacactctttttgtaaaatctgcaagaggatatttggatagctttgaggatttcgttgcaaacgggaatggcttcatataaactctagacagaagcattctcagaaacttcgttgggatgtttcgattgaagtcccagtgttgaacattcccttttatagagcaggttggaaacactctttctgcattccctggaagtggacatttggagcgctttcaggacgacggtgaaaatggaaatatcttccaagaaaatctagatagaagcaatgtcagaaacttttatgtgatggatctactcagctaacagagttgaacctttcttttgagagagcagttttgcaacactctttttgtggaatatgcaagtggatattagggcagctttgaggatttcgttggaaacgggaatacatgtaaaaagcagacagcagcattctcagaaacttctttgtgatgtttgcattgaagtcacagagttgaacattccctttgagagagcaggtttgaaacacgccttttgtcatatctggaagtgtccattcggagcgcattcaggcttgtgttgaaaaaggaaatatcctcccataaaaactagacagaagcattctcagaaacttatctgtgatgtatgtactcaactaacagaactaaaccatcgttttgaaggagcagttttgaaacactctttttgcggaatctgcaagtggatatttggctagctgggaggatttcgttggaaacgggattacatacaaaaagcagacagcagcattctcagaaacttctttgtgatgtttgcattcaagtcacagagttgaacattccctttcatagagcaggtttgaaacactctttttgtagtatctggatgtggacatttggatcgctttcaggcctatggtgaaaaaggaaatatcttcccatgaaaactagacagaagcattctcagaaacttatttgtgatgtgtgccctcaactgacagtgttgaacctttgttttgatagagcagttctgaaacacactttttgtaaaatctgcaagaggatatttggatagctttgaggatttcgttggaaacgggaatgtcttcatgtaaactctacacagaagcattctcagaaactgctttgggatgtttcaattgaagtcccagtgttgaacattccctttcatagagcaggtttgaaaccctctttttgtactatctggaagtggacatttggagcgctttcaggtctacggtgaaaaaggagatatcttccaataaaaactagatagaagcaatgtcagaacttttttcatgatgtatctactcagcaaacagagttgaacctttcttttgagagagcagttttgaaacactccttttgtggaatatgcaagtgggtattaggccagcttggaggatttcgttggaaacgggaatacgtataaaaagcagacagcagcattgtcagaaactactttgtgatgtttgcattcaagtcacagaattgaacactccctttcacagagcaggtttgaaactctctttttgtagtgtctataagtgaacatttggcgtgctttcaggcgtaacgtgaaaaaggaaatatcttcccataaaaactagacagaagcattctcagaaacttgttcttgatgtgtgccctctactgacagagttgaacctttctttgcaaagagcagttttgaaacactctttttgtagaatctgcaagaggatatttggatagctttgaggatttcttgggaaacgggaatgtcttcagataaactctagacagaagcattctcagaaacttctttgggatgtttcaattgaagtcacagtgttgaacattccctttcacagagcaggtttgaaacactctttttgtagtgtctataagtgaacatttggcgtgctttcaggcctaacgtgaaaaaggaaatctcttcccataaaaactagacagaagcattctcagaaacttgttcgtgatgtgtgccctctactgacagagttgaacctttctttgcaaagagcagctttgaaacactctttttgtagaatctgcaagaggatatttggatagctttgaggatttcgttggaaacggggatgtcttcagataaactctagacagaagcattctcagaaacttctttgggatgttgcattcaagtcacagagtagaacattcccattcatagagcagatttgaaacactctttttgtagtatctggaagtggacatttggagcgctttcaggcctatgttgaaaaaggatatatcttcccataaaaactagacggaagcattctcagaaacttacttgtgatgtgtttgctcaactaacagaattgaaccatcgttttgaaggagcagttttgaaacactgttttcgtggaatctgcaagtggatatttggctagctttgaggatttcgttggaaacgggattacatataaaaaggagacagcagcattctcagaaacttctttgtgatgtctgcattcaagtcacagagttgagcattccctttcatagagcaggttggaaacactctttttgtagtatctggatgaggacatttggagcgctttcaggcgtatggtgaaaaaggaaatatcttcccgtaaaaactagacagaagcattctcagaaatttatttgtgatgtgtgccctcaactaacagagttgaacctttcttttgatagagcagttttgaaacactctttttgtaaaatctgcaagaggatatttggatagctttgaggatttcgttgcaaacgggaatggcttcatataaactctagacagaagcattctcagaaacttcgttgggatgtttcgattgaagtcccagtgttgaacattcccttttatagagcaggttggaaacactctttctgcattccctggaagtggacatttggagcgctttcaggacgacggtgaaaatggaaatatcttccaagaaaatctagatagaagcaatgtcagaaacttttatgtgatggatctactcagctaacagagttgaacctttcttttgagagagcagttttgcaacactctttttgtggaatatgcaagtggatattagggcagctttgaggatttcgttggaaacgggaatacatgtaaaaagcagacagcagcattctcagaaacttctttgtgatgtttgcattgaagtcacagagttgaacattccctttgagagagcaggtttgaaacacgccttttgtcatatctggaagtgtccattcggagcgcattcaggcttgtgttgaaaaaggaaatatcctcccataaaaactagacagaagcattctcagaaacttatctgtgatgtatgtactcaactaacagaactaaaccatcgttttgaaggagcagttttgaaacactctttttgcggaatctgcaagtggatatttggctagctgggaggatttcgttggaaacgggattacatacaaaaagcagacagcagcattctcagaaaacttctttgtgatgtttgcattcaagtcacagagttgaacattccctttcatagagcaggtttgaaacactctttttgtagtatctggatgtggacatttggatcgctttcaggcctatggtgaaaaaggaaatatcttcccatgaaaactagacagaagcattctcagaaacttatttgtgatgtgtgccctcaactgacagtgttgaacctttgttttgatagagcagttctgaaacacactttttgtaaaatctgcaagaggatatttggatagctttgaggatttcgttggaaacgggaatgtcttcatgtaaactctagacagaagcattctcagaaactgctttgggatgtttcaattgaagtcccagtgttgaacattcccattcatagagcaggtttgaaacactctttttgtactatctggaagtggacatttggagcgctttcaggtctacggtgaaaaaggagatatcttccaataaaaactagatagaagcaatgtcagaacttttttcatgatgtatctactcagcaaacagagttgaacctttcttttgagagagcagttttgacactgtctttgtggaatatgcaagtgggtattaggccagcttggaggatttcgttggaaacgggaatacgtataaaaagcagacagcagcattgtcagaaactactttgtgatgtttgcattcaagtcacagaattgaacactccctttcacagagcaggtttgaaacactctttttgtagtgtctgtaagtgaacatttggattgctttcaggcctatggtgaaaaaggaaatatcttcccataaaaactagacagaagcattctcagaaacttgtttgtgatgtgtgccctctactgacagagttgaacctttctttgcaaagagcagttttgaaacactctttttgtagaatctgcaagaggatatttggatagctttgaggatttcttgggaaacgggaatgtcttcagataaactctagacagaagcatactcagaaacttctttgggacgtttcaattgaagtcacagtgttgaacattccctttcacagagcaggtttgaaacactctttttgtagtgtctataagtgaacatttggcgtgctttcaggcctaacgtgaaaaaggaaatatcttcccataaaaactagacagaagcattctcagaaacttgttcatgatgtgtgccctctactgacagagttgaacctttctttgcaaagagcagctttgaaacactctttttgtagaatctgcaagaggatatttggatagcttggaggatttcgttggaaacgggtatgtcttcagataaactctagacagaagcattctcagaaacttctttgggatgttgcattcaagtcacagagtagaacattcccattcatagagcagatttgaaacactctttttgtagtatctggaagtggacatttggagcgctttcaggcctatgttgaaaaaggaaatatcttcccataaaaactagacggaagcattctcagaaacttacttgtgatgtgtttgctcaactaacagaattgaaccatcgttttgaaggagcagttttgaaacactgttttcgtggaatctgcaagtggatatttggctagctttgaggatttcgttggaaacgggattacatataaaaaggagacagcagcattctcagaaacttctttgtgatgtctgcattcaagtcacagagttgagcattccctttcatagagcaggttggaaacactctttttgtagtatctggatgaggacatttggagcgctttcaggcgtatggtgaaaaaggaaatatcttcccgtaaaaactagacagaagcattctcagaagtttatttgtgatgtgtgccctcaactaacagagttgaacctttcttttgatagagcagttttgaaacactctttttgtaaaatctgcaagaggatatttggatagctttgaggatttcgttgcaaacgggaatggcttcatataaactctagacagaaagcattctcagaaacttcgttgggatgtttcgattgaagtcccagtgttgaacattcccttttatagagcaggttggaaacactctttctgcattccctggaagtggacatttggagcgctttcaggacgacggtgaaaatggaaatatcttccaagaaaatctagatagaagcaacgtcagaaacttttatgtgatggatctactcagctaacagagttgaacctttcttttgagagagcagttttgcaacacactttttgtggaatatgcaagtggatattagggcagctttgaggatttcgttggaaacgggaatacatgtaaaaagcagacagcagcattctcagaaacttctttgtgatgtttgcattgaagtcacagagttgaacattccctttgagagagcaggtttgaaacacgccttttgtcatatctggaagtgtccattcggagcgcattcaggcttgtgttgaaaaaggaaatatcctcccataaaaactagacagaagcattctcagaaacttatctgtgatgtatgtactcaactaacagaactaaaccatcgttttgaaggagcagttttgaaacactctttttgcggaatctgcaagtggatatttggctagctgggaggatttcgttggaaacgggattacatacaaaaaggagacagcagcattctcagaaacttctttgtgatgtttgcattcaagtcacagagttgaacattccctttcatagagcaggtttgaaacactctttttgtagtatctggatgtggacatttggatcgctttcaggcctatggtgaaaaaggaaatatcttcccatgaaaactagacagaagcattctcagaaacttatttgtgatgtgtgccctcaactgacagtgttgaacctttgttttgatagagcagttctgaaacacactttttgtaaaatctgcaagaggatatttggatagctttgaggatttcgttggaaacgggaatgtcttcatgtaaactctacacagaagcattctcagaaactgctttgggatgtttcaattgaagtcccagtgttgaacattcccattcatagagcaggtttgaaacactctttttgtactatctggaagtggacatttggagcgctttcaggtctacggtgaaaaaggagatatcttccaataaaaactagatagaagcaatgtcagaacttttttcatgatgtatctactcagcacacagagttgaacctttcttttgagagagcagttttgaaacactctttttgtggaatatgcaagtgggtattaggccagcttggaggatttcgttggaaacgggaatatgtataaaaagcagacagcagcattgtcagaaactactttgtgatgtttgcattcaagtcacagaattgaacactccctttcacagagcaggtttgaaacactctttttgtagtgtctgtaagtgaacatatggattgctttcaggcctaaggtgaaaaaggaaatatcttcccataaaaactagacagaagcattctcagaaacttgtttgtgatgtgtgccctctactgacagagttgaacctttctttgcaaagagcagttttgaaacactctttttgtagaatctgcaagaggatatttggatagctttgaggatttcttgggaaacggaatgtcttcagataaactctagacagaagcattctcagaaacttctttgggatatttcaattgaagtcacagtgttgaacattccctttcacagagcaggtttgaaacactctttttgtagtgtctataagtgaacatttggcgtgctttcaggcctaacgtgaaaaaggaaatatcttcccataaaaactagacagaagcattctcagaaacttgttcctgatgtgtgccctctactgacagagttgaacctttctttgcaaagagcagctttgaaacactctttttgtagaatctgcaagaggatatttggatagctttgaggatttcgttggaaacgggtatgtcttcagataaactctagacagaagcattctcagaaacttctttgagatgttgcattcaagtcacagagtagaacattcccattcatagagcagatttgaaacactctttttgtagtatctggaagtggacatttggagcgctttcaggcctatgttgaaaaaggaaatatcttcccataaaaactagacggaagcattctcagaaacttacttgtgatgtgtttgctcaactaacagaattgaaccatcgttttgaaggagcagttttgaaacactgttttcgtggaatctgcaagtggatatttggctagctttgaggatttcgttggaaacgggattacatataaaaaggagacagcagcattctcagaaacttctttgtgatgtctgcattcaagtcacagagttgagcattccctttcatagagcaggttggaaacactctttttgtagtatctggatgaggacatttggagcgctttcaggcgtatggtgaaaaaggaaatatcttcccgtaaaaactagacagaagcattctcagaaatttatttgtgatgtgtgccctcaactaacagagttgaacctttcttttgatagagcagttttgaaacactctttttgtaaaatctgcaagaggatatttggatagctttgaggatttcgttgcaaacgggaatggcttcatataaactctagacagaagcattctcagaaacttcgttgggatgtttcgattgaagtcccagtgttgaacattcccttttatagagcaggttggaaacactctttttgcattccctggaagtggacatttggagcgctttcaggacgacggtgaaaatggaaatatcttccaagaaaatctagatagaagcaatgtcagaaacttttctgtgatggatctactcagctaacagagttgaaactttcttttgagagagcagttttgcaacactctttttgtggaatatgcaagtggatattagggcagctttgaggatttcgttggaaacgggaatacatgtaaaaagcagacagcagcattctcagaaacttctttgtgatgtttgcattgaagtcacagagttgaacattccctttgagagagcaggtttgaaacacgccttttgtcatatctggaagtgtccattcggagcgcattcaggcttgtgttgaaaaaggaaatatcctcccataaaaactagacagaagcattctcagaaacttatctgtgatgtatgtactcaactaacagaactaaaccatcgttttgaaggagcagttttgaaacactctttttgcggaatctgcaagtggatatttggctagctgggaggatttcgttggaaacgggattacatacaaaaagcagacagcagcattctcagaaacttctttgtgatgtttgcattcaagtcacagagttgaacattccctttcatagagcaggtttgaaacactctttttgtagtatctggatgtggacatttggatcgctttcaggcctatggtgaaaaaggaaatatcttcccatgaaaactagacagaagcattctcagaaacttatttgtgatgtgtgccctcaactgacagtgttgaacctttgttttgatagagcagttctgaaacacactttttgtaaaatctgcaagaggatatttggatagctttgaggatttcgttggaaacgggaatgtcttcatgtaaactctagacagaagcattctcagaaactgctttgggatgtttcaattgaagtcccagtgttgaacattccctttcatagagcaggtttgaaacactctttttgtactatctggaagtggacatttggagcgctttcaggtctacggtgaaaaaggagatatcttccaataaaaactagatagaagcaatgtcagaacttttttcatgatgtatctactcagcaaacagagttgaacctttcttttgagagagcagtttcgaaacactctttctgtggaatatgcaagtgggtatttggccagcttggaggatttcgttggaaacgggaatacgtataaaaagcagacagcagcattgtcagaaactactttgtgatgtttgcattcaagtcacagaattgaacactccctttcacagagcaggtttgaaacactctttttgtagtgtctgtaagtgaacatatggattgctttcaggcctaaggtgaaaaaggaaatatcttcccataaaaactagacagaagcattctcagaaacttgtttgtgatgtgtgccctctactgacagagttgaacctttctttgcaaagagcagttttgaaacactctttttgtagaatctgcaagaggatatttggatagctttgaggatttcttgggaaacgggaatgtcttcagataaactctagacagaagcattctcagaaacttctttgggatgtttcaattgaagtcacagtgttgaacattccctttcacagagcaggtttgaaacactctttttgtagtgtctataagtgaacatttggcgtgctttcaggcctaacgtgaaaaaggaaatatcttcccataaaaactagacagaagcattctcagaaacttgttcttgatgtgtcccctctactgacagagttgaacctttctttgcaaagagcagctttgaaacgctctttttgtagaatctgcaagaggatatttggatagcttggaggatttcgttggaaacgggtatgtcttcagataaactctagacagaagcattctcagaaacttctttgggatgttgcattcaagtcacagagtagaacattcccattcatagagcagatttgaaacactctttttgtagtatctggaagtggacatttggagcgctttcaggcctatgttgaaaaaggaaatatcttcccataaaaactagacggaagcattctcagaaacttacttgtgatgtgtttgctcaactaacagaattgaaccatcgttttgaaggagcagttttgaaacactgttttcgtggaatctgcaagtggatatttggctagctttgaggatttcgttggaaacgggattacatataaaaaggagacagcagcattctcagaaacttctttgtgatgtctgcattcaattcacagagttgagcattccctttcatagagccggttggaaacactctttttgtagtatctggatgaggacatttggagcgctttcaggcgtatggtgaaaaaggaaatatcttcccgtaaaaactagacagaagcattctcagaaatttatttgtgatgtgtgccctcaactaacagagttgaacctttcttttgatagagcagttttgaaacactctttttgtaaaatctgcaagaggatatttggatagctttgaggatttcgttgcaaacgggaatggcttcatataaactctagacagaagcattctcagaaacttcgttgggatgtttcgattgaagtcccagtgttgaacattcccttttatagagcaggttggaaacactctttctgcattccctggaagtggacatttggagcgctttcaggacgacggtgaaaatggaaatatcttccaagaaaatctagatagaagcaatgtcagaaacttttatgtgatggatctactcagctaacagagttgaacctttcttttgagagagcagttttgcaacactctttttgtggaatatgcaagtggatattagggcagctttgaggatttcgttggaaacgggaatacatgtaaaaagcagacagcagcattctcagaaacttctttgtgatgtttgcattgaagtcacagagttgaacattccctttgagagagcaggtttgaaacacgccttttgtcatatctggaagtgtccattcggagcgcattcaggcttgtgttgaaaaaggaaatatcctcccataaaaactagacagaagcattctcagaaacttatctgtgatgtatgtactcaactaacagaactaaaccatcgttttgaaggagcagttttgaaacactctttttgcggaatctgcaagtggatatttggctagctgggaggatttcgttggaaacgggattacatacaaaaagcagacagcagcattctcagaaacttctttgtgatgtttgcattcaagtcacagagttgaacattccctttcatagagcaggtttgaaacactctttttgtagtatctggatgtggacatttggatcgctttcaggcctatggtgaaaaaggaaatatcttcccatgaaaactagacagaagcattctcagaaacttatttgcgatgtgtgccctcaactgacagtgttgaacctttgttttgatagagcagttctgaaacacactttttgtaaaatctgcaagaggatatttggatagctttgaggatttcgttggaaacgggaatgtcttcatgtaaactctggacagaagcattctcagaaactgctttgggatgtttcaattgaagtcccagtgttgaacattcccattcatagagcaggtttgaaacactctttttgtactatctggaagtggacatttggagcgctttcaggtctacggtgaaaaaggagatatcttccaataaaaactagatagaagcaatgtcagaacttttttcatgatgtatctactcagcaaacagagttgaacctttcttttgagagagcagttttgaaacactctttttgtggaatatgcaagtgggtattaggccaccttggaggatttcgttggaaacgggaatacgtataaaaagcagacagcagcattgtcagaaactactttgtgatgtttgcattcaagtcacagaattgaacactccctttcacagagcaggtttgaaacactctttttgtagtgtctgtaagtgaacatttggattgctttcaggcctaaggtgaaaaaggaaatatcttcccataaaaactagacagaagcattctcagaaacttgtttgtgatgtgtgccctctactgacagagttgaacctttctttgcaaagagcagttttgaaacactctttttgtagaatctgcaagaggatatttggatagctttgaggatttcttgggaaacgggaatgtcttcagataaactctagacagaagcatactcagaaacttctttgggacgtttcaattgaagtcacagtgttgaacattccctttcacagagcaggtttgaaacactctttttgtagtgtctataagtgaacatttggcgtgctttcaggcctaacgtgaaaaaggaaatatcttcccataaaaactagacagaagcattctcagaaacttgttcatgatgtgtgccctctactgacagagttgaacctttctttgcaaagagcatctttgaaacactccttttgtagaatctgcaagaggatatttggatagctttgaggatttcgttggaaacgggtatgtcttcagataaactctagacagaagcattctcagaaacttctttgggatgttgcattcaagtcacagagtagaacattcccattcatagagcagatttgaaacactctttttgtagtatctggaagtggacatttggagcgctttcaggcctatgttgaaaaaggaaatatcttcccataaaaactagacggaagcattctcagaaacttacttgtgatgtgtttgctcaactaacagaattgaaccatcgttttgaaggagcagttttgaaacactgttttcgtggaatctgcaagtggatatttggctagctttgaggatttcgttggaaacgggattacatatacaaaggagacagcagcattctcagaaacttctttgtgatgtctgcattcaagtcacagagttgagcgttccctttcatagagcaggttggaaacactctttttgtagtatctggatgaggacatttggagcgcttccaggcgtatggtgaaaaaggaaatatcttccgtaaaaactagacagaagcattctcagaaatttatatgtgatgtgtgccctcaactaacagagttgaacctttcttttgatagaacagttttgaaacactctttttgtaaaatctgcaagaggatatttggatagctttgaggatttcgttccaaacgggaatggcttcatataaactctagacagaagcattctcagaaacttcgttgggatgtttcgattgaagtcccagtgttgaacattcccttttatagagcaggttggaaacactctttctgcattccctggaagtggacatttggagcgctttcaggacgacggtgaaaatggaaatatcttccaagaaaatctaggtagaagcaacgtcagaaacttttctgtgatggatctactcagctaacagagttgaacctttcttttgagagagcagttttgcaacactctttttgtggaatatgcaagtggatattagggcagctttgaggatttcgttggaaacgggaatacatgtaaaaagcagacagcagcattctcagaaacttctttgtgatgtttgcattgaagtcacagagttgaacattccctttgagagagcaggtttgaaacacgccttttgtcatatctggaagtgtccattcggagcgcattcaggcttgtgttgaaaaaggaaatatcctcccataaaaactagacagaagcattctcagaaacttatctgtgatgtatgtactcaactaacagaactaaaccatcgttttgaaggagcagttttgaaacactctttttgcggaatctgcaagtggatatttggctagctgggaggatttcgttggaaacgggattacatacaaaaagcagacagcagcattctcagaaacttctttgtgatgtttgcattcaagtcacagagttgaacattccctttcatagagcaggtttgaaacactctttttgtagtatctggatgtggacatttggatcgctttcaggcctatggtgaaaaaggaaatatcttcccatgaaaactagacagaagcattctcagaaacttatttgtgatgtgtgccctcaactgacagtgttgaacctttgttttgatagagcagttctgaaacacactttttgtaaaatctgcaagaggatatttggatagctttgaggatttcgttggaaacgggaatgtcttcatgtaaactctacacagaagcattctcagaaactgctttgggatgtttcaattgaagtcccagtgttgaacattcccattcatagagcaggtttgaaacactctttttgtactatctggaagtggacatttggagcgctttcaggtctacggtgaaaaaggagatatcttccaataaaaactagatagaagcaatgtcagaacttttttcatgatgtatctactcagcacacagagttgaacctttcttttgagagagcagttttgaaacactctttttgtggaatatgcaagtgggtattaggccagcttggaggatttcgttggaaacgggaatacgtataaaaagcagacagcagcattgtcagaaactactttgtgatgtttgcattcaagtcacagaattgaacactccctttcacagagcaggtttgaaacactctttttgtagtgtctgtaagtgaacatatggattgctttcaggcctaaggtgaaaaaggaaatatcttcccataaaaactagacagaagcattctcagaaacttgtttgtgatgtgtgccctctactgacagagttgaacctttctttgcaaagagcagttttgaaacactctttttgtagaatctgcaagaggatatttggatagctttgaagatttcttgggaaacgggaatgtcttcagataaactctagacagaagcattctcagaaacttctttgggatgtttcaattgaagtcacagtgttgaacattccctttcacagagcaggtttgaaacactctttttgtagtgtctataagtgaacatttggcgtgctttcaggcctaacgtgaaaaaggaaatatcttcccataaaaactagacagaagcattctcagaaacttgttcatgatgtgtgccctctactgacagagttgaacctttctttgcaaagagcagctttgaaacactctttttgtagaatctgcaagaggatatttggatagcttggaggatttcgttggaaacgggtatgtcttcagataaactctagacagaagcattctcagaaacttctttgggatgttgcattcaagtcacagagtagaacattcccattcatagagcagatttgaaacactctttttgtagtatctggaagtggacatttggagcgctttcaggcctatgttgaaaaaggaaatatcttcccataaaaactagacggaagcattctcagaaacttatttgtgatgtgtttgctcaactaacaggattgaaccatcgttttgaaggagcagttttgaaacactgttttcgtggaatctgcaagtggatatttggctagctttgaggatttcgttggaaacgggattacatatacaaaggagacagcagcattctcagaaacttctttgtgatgtctgcattcaattcacagagttgagcattccctttcctagagcacgttggaaacactctttttgtagtatctggatgaggacatttggagcgctttcaggcgtatggtgaaaaaggaaatatcttcccgtaaaaactagacagaagcattctcagaagtttatttgtgatgtgtgccctcaactaacagagttgaacctttcttttgatagagcagttttgaaacactctttttgtaaaatctgcaagaggatatttggatagctttgaggatttcgttgcaaacgggaatggcttcatataaactctagacagaagcattctcagaaacttcgttgggatgtttcgattgaagtcccagtgttgaacattcccttttatagagcaggttggaaacactctttctgcattccctggaagtggacatttggagcgctttcaggacgacggtgaaaatggaaatatcttccaagaaaatctagatagaagcaacgtcagaaacttttctgtgatggatctactcagctaacagagttgaacctttcttttgagagagcagttttgcaacactctttttgtggaatatgcaagtggatattagggcagctttgaggatttcgttggaaacgggaatacatgtaaaaagcagacagcagcattctcagaaacttctttgtgatatttgcattgaagtcacagagttgaacattccctttgagagagcaggtttgaaacacgccttttgtcatatctggaagtgtccattcggagcgcattcaggcttgtgttgaaaaaggaaatatcctcccataaaaactagacagaagcattctcagaaacttatctgtgatgtatgtactcaactaacagaactaaaccatcgttttgaaggagcagttttgaaacactctttttgcggaatctgcaagtggatatttggctagctgggaggatttcgttggaaacgggattacatacaaaaagcagagagcagcattctcagaaacttctttgtgatgtttgcattcaagtcacagagttgaacattccctttcatagagcaggtttgaaacactctttttgtagtatctggatgtggacatttggatcgctttcaggcctatggtgaaaaaggaaatatcttcccatgaaaactagacagannnnnnnnnnnnnnnnnnnnnnnnnnnnnnnnnnnnnnnnnnnnnnnnnnnnnnnnnnnnnnnnnnnnnnnnnnnnnnnnnnnnnnnnnnnnnnnnnnnntaaacagtcaagagaagccacgcagcaccctgaaacactttgcttagagattttttctatcgaatatcctagttcatcactcctaagttctgatttccacaaagtactaacacggacacaattcacaacacggacacaagatcttattggaagctgtgtctagagtttacatgaagacattcccgtttccaacgaaatcctcaaagctatccaaatatcctcttgcagattttacaaaaagtgtgtttcagaactgctctatcaaaacaaaggttcaacactgtcagttgagggcacacatcacaaataagtttctgagaatgcttcagcattctcagaaacttcgttgggatgtttcgattgaagtcccagtgttgaacattcccttttatagagtaggttggaaacactctttctgcattccctggaagtggacatttggagcgctttcaggacgacggtgtaaatggaaatatcttccaagaaaatctagatagaagcaacgtcagaaacttttatgtgatggatctactcagctaacagagttgaacctttcttttgagagagcagttttgcaacactctttttgtggaatatgcaagtggatattagggcagctttgaggatttcgttggaaacgggaatacatgtaaaaagcagacagcagcattctcagaaacttctttgtgatgtttgcattgaagtcacagagttgaacattccctttgagagagcaggtttgaaacacgccttttgtcatatctggaagtgtccattcggagcgcattcaggcttgtgttgaaaaaggaaatatcctcccagaaaaactagacagaagcattctcagaaacttatttgtgatgtatgtactcaactaacagaactaaaccatcgttttgaaggagcagttttgaaacactctttttgcggaatctgcaagtggatatttggctagcttggaggatttcgttggaaacgggattacatacaaaaagcagagagcagcattctcagaaacttctttgtgatgtttgcattcaagtcacagagttgaacattccctttcatagagcaggtttgaaacactctttttgtagtatctggatgtggacatttggatcgctttcaggcctatggtgaaaaaggaaatatcttcccatgaaaactagacagaagcattctcagaaacttatttgtgatgtgtgccctcaactgacagtgttgaacctttgttttgatagagcagttctgaaacacactttttgtaaaatctgcaagaggatatttggatagctttgaggatttcgttggaaacgggaatgtcttcatgtaaactctacacagaagcattctcagaaactgctttgggatgtttcaattgaagtcccagtgttgaacattcccattcatagagcaggtttgaaacactctttttgtactatctggaagtggacatttggagcgctttcaggtctacggtgaaaaaggagatatcttccaataaaaactagatagaagcaatgtcagaacttttttcatgatgtatctactcagcaaacagagttgaacctttcttttgagagagcagttttgaaacactctttttgtggaatatgaaagtgggtattaggccagcttggaggatttcgttggaaacgggaatacgtataaaaagcagacagcagcattgtcagaaactactttgtgatgtttgcattcaagtcacagaactgaacactccctttcacagagcaggtttgaaacactctttttgtagtgtctgtaagtgaacatttggattgctttcaggcctaaggtgaaaaaggaaatatcttcccataaaaactagacagaagcattctcagaaacttgtttgtgatgtgtgccctctactgacagagttgaacctttctttgcaaagagcagttttgaaacactctttttgtagaatctgcaagaggatatttggatagctttgaggatttcttgggaaacgggaatgtcttcagataaactctagacagaagcattctcagaaacttctttgggatgtttcaattgaagtcacagtgttgaacattccctttcacagagcaggtttgaaacactctttttgtagtgtctgtaagtgaacatttggcgtgctttcaggcctaacgtgaaaaaggaaatatcttcccataaaaactagacagaagcattctcagaaacttgttcgtgatgtgtgccctctactgacagagttgaacctttctttgcaaagagcagctttgaaacactctttttgtagaatctgcaagaggatatgtggatagctttgaggatttcgttggaaacgggtatgtcttcagataaactctagacagaagcattctcagaaacttctttgggatgtttcaattgaagtcacagtgttgaacattccctttcacagagcaggtttgaaacactctttttgtagtgtctataagtgaacatttggcgtgctttcaggcctaacgtgaaaaaggaaatatcttcccataaaaactagacagaagcattctcagaaacttgttcgtgatgtgtgccctctactgacagagttgaacctttctttgcaaagagcagctttgaaacactctttttgtagaatctgcaagaggatatttggatagctttgaggatttcgttggaaacgggtatgtcttcagataaactctagacagaagcattctcagaaacttctttgggatgtttcaattgaagtcacagtgttgaacattccctttcacagagcaggtttgaaacactctttttgtagtgtctataagtgaacatttggcgtgctttcaggcgtaacgtgaaaaaggaaatatcttcccataaaaactagacggaagcattcttagaaacttacttgtgatgtgtttgctcaactaacagaattgaaccatcgttttgaaggagcagttttgaaacactgttttcgtggaatctgcaagtggatatttggctagctttgaggatttcgttggaaacgggattacatataaaaaggagacagcagcattctcagaaacttctttgtgatgtctgcattcaagtcacagagttgagcattccctttcatagagcaggttggaaacactctttttgtagtatctggatgaggacatttggagcgctttcaggcgtatggtgaaaaaggaaatatcttcccgtaaaaactagacagaagcattctcagaaatttatttgtgatgtgtgccctcaactaacagagttgaacctttcttttgatagagcagttttgaaacactctttttgtaaaatctgcaagaggatatttggatagctttgaggatttcgttgcaaacgggaatggcttcatataaactctagacagaagcattctcagaaacttcgttgggatgtttcgattgaagtcccagtgttgaacattcccttttatagagcaggttggaaacactctttctgcattccctggaagtggacatttggagcgctttcaggacgacggtgaaaatggaaatatcttccaagaaaatctagatagaagcaatgtcagaaacttttctgtgatggatctactcagctaacagagttgaacctttcttttgagagagcagttttgcaacactctttttgtggaatatgcaagtggatattagggcagctttgaggatttcgttggaaacgggaatacatgtaaaaagcagacagcagcattctcagaaacttctttgtgatgtttgcattgaagtcacagagttgaacattccctttgagagagcaggtttgaaacacgccttttgtcatatctggaagtgtccattcggagcgcattcaggcttgtgttgaaaaaggaaatatcctcccagaaaaactagacagaagcattctcagaaacttatctgtgatgtatgtactcaactaacagaactaaaccatcgttttgaaggagcagttttgaaacactctttttgcggaatctgcaagtggatatttggctagctgggaggatttcgttggaaacgggattacatacaaaaagcagacagcagcattctcagaaacttctttgtgatgtttgcattcaagtcacagagttgaacattccctttcatagagcaggtttgaaacactctttttgtagtatctggatgtggacatttggatcgctttcaggcctatggtgaaaaaggaaatatcttcccatgaaaactagacagaagcattctcagaaacttatttgtgatgtgtgtcctcaactgacagtgttgaacctttgttttgatagagcagttctgaaacacactttttgtaaaatctgcaagaggatatttggatagctttgaggatttcgttggaaacgggaatgtcttcatgtaaactctagacagaagcattctcagaaactgctttgggatgtttcaattgaagtcccagtgttgaacattccctttcatagagcaggtttgaaacactctttttgtactatctggaagtggacatttggagcgctttcaggtctacggtgaaaaaggatatatcttccaataaaaactagatagaagcaatgtcagaacttttttcatgatgtatctactcagcaaacagagttgaacctttcttttgagagagcagttttgaaacactctttttgtggaatatgcaagtgggtattaggccagcttggaggatttcgttggaaacgggaatacgtataaaaagcagacagcagcattgtcagaaactactttgtgatgtttgcattcaagtcacagaattgaacactccctttcacagagcaggtttgaaacactctttttgtagtgtctgtaagtgaacatatggattgctttcaggcctaaggtgaaaaaggaaatatcttcccataaaaactagacagaagcattctcagaaacttgtttgtgatgtgtgccctctactgacagagttgaacctttctttgcaaagagcagttttgaaacactctttttgtagaatctgcaagaggatatttggatagctttgaggatttcttgggaaacgggaatgtcttcagataaactctagacagaagcattctcagaaacttctttgggatgtttcaattgaagtcacagtgttgaacattccctttcacagagcaggtttgaaacactctttttgtagtgtctataagtgaacatttggcgtgctttcaggcctaacgtgaaaaaggaaatatcttcccataaaaactagacagaagcattctcagaaacttgttcgtgatgtgtgccctctactgacagagttgaacctttctttgcaaagagcagctttgaaacacactttttgtagaatctgcaagaggatatttggaaagctttgaggatttcgttggaaacgggtatgtcttcagataaactctagacagaagcattctcagaaaattctttgggatgttgcattcaagtcacagagtagaacattcccattcatagagcagatttgaaacactctttttgtagtatctggaagtggacatttggagcgctttcaggcctatgttgaaaaaggaaatatcttcccataaaaactagacggaagcattctcagaaacttacttgtgatgtgtttgctcaactaacagaattgaaccatcgttttgaaggagcagttttgaaacactgttttcgtgtaatctgcaagtggatatttggctagctttgaggatttcgttggaaatgggattacatataaaacggagccagcagcattctcagaaacttctttgtgatgtctgcattcaagtcacagagttgagcattccctttcatagagcaggttggaaacactcttttagtagtatctggatgaggacatttggagcgctttcaggcgtatggtgaaaaaggaaatatcttcccgtaaaaactagacagaagcattctcagaagtttatttgagatgtgtgccctcaactaacagagttgaacctttcttttgatagagcagttttgaaacactctttttgtaaaatctgcaagaggatatttggatagctttgaggatttcgttgcaaacgggaatggcttcatataaactctagacagaagcattctcagaaacttcgttgggatgttttgattgaagtcccagtgttgaacattcccttttatagagcaggttggaaacactctttctgcattccctggaagtggacatttggagcgctttcaggacgacggtgaaaatggaaatatcttccaataaaatctagatagaagcaatgtcagaaacttttctgtgatggatctactcagctaacagagttgaacctttcttttgagagagcagttttgcaacactctttttgtggaatatgcaagtggatattagggcagctttgaggatttcgttggaaacgggaatacatgtaaaaagcagacagcagcattctcagaaacttctttgtgatgtttgcattgaagtcacagagttgaacattccctttgagagagcaggtttgaaacacgccttttgtcatatctggaagtgtccattcggagcgcattcaggcttgtgttgaaaaaggaaatatcctcccataaaaactagacagaagcattctcagaaacttatctgtgatgtatgtactcaactaacagaactaaaccatcgttttgaaggagcagttttgaaacactctttttgcggaatctgcaagtggatatttggctagctgggaggatttcgttggaaacgggattacatacaaaaagcagacagcagcattctcagaaacttctttgtgatgtttgcattcaagtcacagagttgaacattccctttcatagagcaggtttgaaacactctttttgtagtatctggatgtggacatttggatcgctttcaggcctatggtgaaaaaggaaatatcttcccatgaaaactagacagaagcattctcagaaacttatttgtgatatgtgccctcaactgacagtgttgaacctttgttttgatagagcagttctgaaacacactttttgtaaaatctgcaagaggatatttggatagctttgaggatttcgttggaaacgggaatgtcttcatgtaaactctacacagaagcattctcagaaactgctttgggatgtttcaattgaagtcccagtgttgaacattcccattcatagagcaggtttgaaacactctttttgtactatctggaagtggacatttggagcgctttcaggtctacggtgaaaaaggagatatcttccaataaaaactagatagaagcaatgtcagaacttttttcatgatgtatctactcagctaacagagttgaacctttcttttgagagagcagttttgaaacactctttttgtggaatatgcaagtgggtattaggccagcttggaggatttcgttggaaacgggaatacgtataaaaagcagacagcagcattgtcagaaactactttgtgatgtttgcattcaagtcacagaattgaacactccctttcacagagcaggtttgaaacactctttttgtagtgtctataagtgaacatttggcgtgctttcaggcctaaggtgaaaaaggaaatatcttcccataaaaactagacagaagcattctcagaaacttgttcgtgatgtgtgccctctactgacagagttgaacctttctttgcaaagagcagctttgaaacactctttttgtagaatctgcaagaggatatttggatagctttgaggatttcgttggaaacgggtatgtcttcagataaactctagacagaagcattctcagaaacttctttgggatgttgcattcaagtcacagagtagaacattcccattcatagagcagatttgaaacactctttttgtagtatctggaagtggacatttggagcgctttcaggcctatgttgaaaaaggaaatatcttcccataaaaactagacggaagcattctcagaaacttacttgtgatgtgtttgctcaactaacagaattgaaccatcgttttgaaggagcagttttgaaacactgttttcgtggaatctgcaagtggatatttggctagctttgaggatttcgttggaaacgggattacatataaaaaggagacagcagcattctcagaaacttctttgtgatgtctgcattcaagtcacagagttgagcattccctttcatagagcaggttggaaacactctttttgtagtatctggatgaggacatttggagcgctttcaggcctatggtgaaaaaggaaatatcttcccgtaaaaactagacagaagcattctcagaaatttatttgtgatgtgtgccctcaactaacagagttgaacctttcttttgatagagcagttttgaaacactctttttgtaaaatctgcaagaggatatttggatagcttggaggatttcattgcaaacgggaatggcttcatataaactctagacagaagcattctcagaaacttcgttgggatgtttcgattgaagtcccagtgttgaacattcccttttatagagcaggttggaaacactctttctgcattccctggaagtggacatttggagcgctttcaggacgacggtgaaaatggaaatatcttccaataaaatctagatagaagcaacgtcagaaacttttctgtgatggatctactcagctaacagagttgaacctttcttttgagagagcagttttgcaacactctttttgtggaatatgcaagtggatattagggcagctttgaggatttcgttggaaacgggaatacatgtaaaaagcagacagcagcattctcagaaacttctttgtgatgtttgcattgaagtcacagagttgaacattccctttgagagagcaggtttgaaacacgccttttgtcatatctggaagtgtccattcggagcgctttcaggcttgtgttgaaaaaggaaatatcctcccagaaaaactagacagaagcattctcagaaacttatctgtgatgtatgtactcaactaacagaactaaaccatcgttttgaaggagcagttttgaaacactctttttgcggaatctgcaagtggatatttggctagctgggaggatttcgttggaaacgggattacatacaaaaagcagacagcagcattctcagaaacttctttgtgatgtttgcattcaagtcacagagttgaacattccctttcatagagcaggtttgaaacactctttttgtagtatctggatgtggacatttggatcgctttcaggcctatggtgaaaaaggaaatatcttcccatgaaaactagacagaagcattctcagaaacttatttgtgatgtgtgccctcaactgacagtgttgaacctttgttttgatagagcagttctgaaacacactttttgtaaaatctgcaagaggatatttggatagctttgaggatttcgttggaaacgggaatgtcttcatgtaaactctagacagaagcattctcagaaactgctttgggatgtttcaattgaagtcccagtgttgaacattccctttcatagagcaggtttgaaacactctttttgtagtatctggaagtggacatttggagcgctttcaggtctacggtgaaaaaggagatatcttccaataaaaactagatagaagcaatgtcagaacttttttcatgatgtatctactcagcaaacagagttgaacctttcttttgagagagcagttttgaaacactctttttgtggaatatgcaagtgggtattaggccagcttggaggatttcgttggaaacgggaatacgtataaaaagcagacagcagcattgtcagaaactactttgtgatgtttgcattcaagtcacagaattgaacactccctttcacagagcaggtttgaaacactctttttgtagtgtctgtaagtgaacatttggattgctttcaggcctaaggtgaaaaaggaaatatcttcccataaaaactagacggaagcattctcagaaacttgtttgtgatgtgtgccctctactgacagagttgaacctttctttgcaaagagcagttttgaaacactctttttgtagaatctgcaagaggatatttggatagctttgaggatttcttgggaaacgggaatgtcttcagataaactctagacagaagcattctcagaaacttctttgggatgtttcaattgaagtcacagtgttgaacattccctttcacagagcaggtttgaaacactctttttgtagtgtctataagtgaacatttggcgtgctttcaggcctaacgtgaaaaaggaaatatcttcccataaaaactagacagaagcattctcagaaacttgttcttgatgtgtcccctctactgacagagttgaacctttctttgcaaagagcagctttgaaacactctttttgtagaatctgcaagaggatatttggatagcttggaggatttcgttggaaacgggtatgtcttcagataaactctagacagaagcattctcagaaacttctttgggatgttgcattcaagtcacagagtagaacattcccattcatagagcagatttgaaacactctttttgtagtatctggaagtggacatttggagcgctttcaggcctatgttgaaaaaggaaatatcttcccataaaaactagacggaagcattctcagaaacttatttgtgatgtgtttgctcaactaacaggattgaaccatcgttttgaaggagcagttttgaaacactgttttcgtggaatctgcaagtggatatttggctagctttgaggatttcgttggaaacgggattacatatacaaaggagacagcagcattctcagaaacttctttgtgatgtctgcattcaattcacagagttgagcattccctttcatagagcaggttggaaacactctttttgtagtatctggatgaggacatttggagcgctttcaggcgtatggtgaaaaaggaaatatcttcccgtaaaaactagacagaagcattctcagaagtttatttgtgatgtgtgccctcaactaacagagttgaacctttcttttgatagagcagttttgaaacactctttttgtaaaatctgcaagaggatatttggatagctttgaggatttcgttgcaaacgggaatcgcttcatataaactctagacagaagcattctcagaaacttcgttgggatgtttcgattgaagtcccagtgttgaacattcccttttatagagcaggttggaaacactctttctgcattccctggaagtggacatttggagcgctttctggacgacggtgaaaatggaaatatcttccaagaaaatctagatagaagcaatgtcagaaacttttatgtgatggatctactcagctaacagagttgaacctttcttttgagagagcagttttgcaacactccttttgtggaatatgcaagtggatattagggcagctttgaggatttcgttggaaacgggaatacatgtaaaaagcagacagccagcattctcagaaacttctttgtgatgtttgcattgaagtcacagagttgaacattccctttgagagagcaggtttgaaacacgccttttgtcatatctggaagtgtccattcggagcgcattcaggcttgtgttgaaaaaggaaatatcctcccataaaaactagacagaagcattctccgaaacttatctgtgatgtatgtactcaactaacagaactaaaccatcgttttgaaggagcagttttgaaacactctttttgcggaatctgcaagtggatatttggctagctgggaggatttcgttggaaacgggattacatacaaaaagcagacagcagcattctcagaaacttctttgtgatgtttgcattcaagtcacagagttgaacattccctttcatagagcaggtttgaaacactctttttgtagtatctggatgtggacatttggatcgctttcaggcctatggtgaaaaaggaaatatcttcccatgaaaactagacagaagcattctcagaaacttatttgtgatgtgtgccctcaactgacagtgttgaacctttgttttgatagagcagttctgaaacacactttttgtaaaatctgcaagaggatatttggatagctttgaggatttcgttggaaacgggaatgtcttcatgtaaactctacacagaagcattctcagaaactgctttgggatgtttcaattgaagtcccagtgttgaacattcccattcatagagcaggtttgaaacactctttttgtactatctggaagtggacatttggagcgctttcaggtctacggtgaaaaaggagatatcttccaataaaaactagatagaagcaatgtgagaacttttttcatgatgtatctactcagctaacagagttgaacctttcttttgagagagcagttttgaaacactatttttgtggaatatgcaagtgggtattaggccagcttggaggatttcgttggaaacgggaatacgtataaaaagcagacagcagcattgtcagcaaactactttgtgatgtttgcattcaagtcacagaattgaacactccctttcacagagcaggtttgaaacactctttttgtagtgtctgtaagtgaacatttggattgctttcacgcctaaggtgaaaaaggaaatatcttcccataaaaactagacagaagcattctcagaaacttgtttgtgatgtgtgccctctactgacagagttgaaactttctttgcaaagagcagttttgaaacactctttttgtagaatctgcaagaggatatttggatagctttgaggatttcttgggaaacgggaatgtcttcagataaactctagacagaagcattctcagaaacttctttgggatgtttcaattgaagtcagtgttgaacattccctttcacagagcaggtttgaaacactctttttgtagtgtctataagtgaacatttggcgtgctttcaggcctaacgtgaaaaaggaaatatcttcccataaaaactagacagaagcattctcagaaacttgttcttgatgtgtcccctctactgacagagttgaacctttctttgcaaagagcagctttgaaacactctttttgtagaatctgcaagaggatatttggatagcttggaggatttcgttggaaacgggtatgtcttcagataaactctagacagaagcattctcagaaacttctttgggatgttgcattcaagtcacagagtagaacattcccattcatagagcagatttgaaacactctttttgtagtatctggaagtggacatttggagcgctttcaggcctatgttgaaaaaggaaatatcttcccataaaaactagacggaagcattctcagaaacttatttgtgatgtgtttgctcaactaacaggattgaaccatcgttttgaaggagcagttttgaaacactgttttcgtggaatctgcaagtggatatttggctagctttgaggatttcgttggaaacgggattacatatacaaaggagacagcagcattctcagaaacttctttgtgatgtctgcattcaattcacagagttgagcattccctttcatagagcaggttggaaacactctttttgtagtatctggatgaggacatttggagcgctttcaggcgtatggtgaaaaaggaaatatcttcccgtaaaaactagacagaagcattctcagaagtttatttgtgatgtgtgccctcaactaacagagttgaacctttcttttgatagagcagttttgaaacactctttttgtaaaatctgcaagaggatatttggatagctttgaggatttcgttgcaaacgggaatggcttcatataaactctagacagaagcattctcagaaacttcgttgggatgtttcgattgaagtcccagtgttgaacattcccttttatagagcaggttggaaacactctttctgcattccctggaagtggacatttggagcgctttcaggacgacggtgaaaatggaaatatcttccaagaaaatctagatagattttttctttatttttttgagacagagtctcactgtgtcaccattgctggagtgcagtgttgcaaaactgctctctcaaaagaaaggttcaactctgttagctgagtagatccgtcacataaaagtttctgacattgcttcnnnnnnnnnnnnnnnnnnnnnnnnnnnnnnnnnnnnnnnnnnnnnnnnnnnnnnnnnnnnnnnnnnnnnnnnnnnnnnnnnnnnnnnnnnnnnnnnnnnnagcattctcagaaacttctttgtgatgtttgcattgaagtcacagagttgaacattccctttgagagagcaggtttgaaacatgccttttgtcatatctggaagtgtccattcggagcgcattcaggcttgtgttgaaaaaggaaatatcctcccagaaaaactagacagaagcattctcagaaacttatttgtgatgtatgtactcaagtaacagaactaaaccatcgttttgaaggagcagttttgaaacactctttttgcggaatctgcaagtggatatttggctagctgggaggatttcgttggaaacgggattacatacaaaaagcagacagcagcattctcagaaacttctttgtgatgtttgcattcaagtcacagagttgaacattccctttcatagagcaggtttgaaacactctttttgtagtatctggatgtggacatttggatcgctttcaggcctatggtgaaaaaggaaatatcttcccatgaaaactagacagaagcattctcagaaacttatttgtgatgtgtgccctcaactgacagtgttgaacctttgttttgatagagcagttctgaaacacactttttgtaaaatctgcaagaggatatttggatagctttgaggatttcgttggaaacgggaatgtcttcatgtaaactctagacagaagcattctcagaaactgctttgggatgtttcaattgaagtcccagtgttgaacattccctttcatagagcaggtttgaaacactctttttgtagtatctggaagtggacatttggagcgctttcaggtctacggtgaaaaaggagatatcttccaataaaaactagatagaagcaatgtcagaacttttttcatgatgtatctactcagcaaacagagttgaacctttcttttgagagagcagttttgaaacactctttttgtggaatatgcaagtgggtattaggccagcttggaggatttcgttggaaacgggaatacgtataaaaagcagacagcagcattgtcagaaactactttgtgatgtttgcattcaagtcacagaattgaacactccctttcacagagcaggtttgaaacactctttttgtagtgtctgtaagtgaacatttggattgctttcaggcctaaggtgaaaaaggaaatatcttcccataaaaactagacagaagcattctcagaaacttgttcttgatgtgtctcctctactgacagagttgaacctttctttgcaaagagcagttttgaaacactctttttgtagaatctgcaagaggatatttggatagctttgaggatttcttgggaaacgggaatgtcttcagataaactctagacagaagcattctcagaaacttctttgggatgtttcaattgaagtcacagtgttgaacattccctttcacagagcaggtttgaaacactctttttgtagtgtctataagtgaacatttggcgtgctttcaggcgtaacgtgaaaaaggaaatatcttcccataaaaaccagacagaagcattctcagaaacttgtttgtgatgtgtgccctctactgacagagttgaacctttctttgcaaagagcagctttgaaacactctttttgtagaatctgcaagaggatatgtggatagctttgaggatttcgttggaaacgggtatgtcttcagataaactctagacagaagcattctcagaaacttctttgggatgttgcatgcaagtcacagagtagaacattcccattcatagagcagatttgaaacactctttttgtagtatctggaagtggacatttggagcgctttcaggcctatgttgaaaaaggaaatatcttcccataaaaactagacggaagcattctcagaaacttatttgtgatgtgtttgctcaactaacaggattgaaccatcgttttgaaggagcagttttgaaacactgttttcgtggaatctgcaagtggatatttggctagctttgaggatttcgttggaaacgggattacatataaaaaggagacagcagcattctgagaaacttctttgtgatgtctgcattcaattcacagagttgagcattccctttcatagagcaggtttgaaacactctttttgtagtatctggatgtggacatttggatcgctttcaggcctatggtgaaaaaggaaatatcttcccatgaaaactagacagaagcattctcagaagtttatttgtgatgtgtgccctcaactgacagtgttgaacctttgttttgatagagcagttctgaaagacactttttgtaaaatctgcaagaggatatttggatagctttgaggatttcgttggaaacgggaatgtcttcatgtaaactctagacagaagcattctcagaaactgctttgggatgtttcaattgaagtcccagtgttgaacattcccattcatagagcaggtttgaaacactctttttgtactatctggaagtggacatttggagcgctttcaggtctacggtgaaaaaggagatatcttccaataaaaactagatagaagcaatgtcagaacttttttcatgatgtatctactcagcacacagagttgaacctttcttttgagagagcagttttgaaacactctttttgtggaatatgcaagtgggtattaggccagcttggaggatttcgttggaaacgggaatacgtataaaaagcagacagcagcattgtcagaaactactttgtgatgtttgcattcaagtcacagaattgaacactccctttcacagagcaggtttgaaacactctttttgtagtgtctgtaagtgaacatatggattgctttcaggcctaaggtgaaaaaggaaatatcttcccataaaaactagacagaagcattctcagaaacttgtttgtgatgtgtgccctctactgacagagttgaacctttctttgcaaagagcagttttgaaacactctttttgtagaatctgcaagaggatatttggatagctttgaagatttcttgggaaacgggaatgtcttcagataaactctagacagaagcattctcagaaacttctttgggatgtttcaattgaagtcacagtgttgaacattccctttcacagagcaggtttgaaacactctttttgtagtgtgtataagtgaacatttcgcgtgctttcaggcctaacgtgaaaaaggaaatatcttcccataaaaactagacagaagcattctcagaaacttgttcatgatgtgtgccctctactgacagagttgaacctttctttgcaaagagcagctttgaaacactctttttgtagaatctgcaagaggatatttggatagcttggaggatttcgttggaaacgggtatgtcttcagataaactctagacagaagcattctcagaaacttctttgggatgttgcattcaagtcacagagtagaacattcccattcatagagcagatttgaaacactctttttgtagtatctggaagtggacatttggagctgctttcaggcctatgttgaaaaaggaaatatcttcccataaaaactagacggaagcattctcagaaacttacttgtgatgtgtttgctcaactaacagaattgaaccatcgttttgaaggagcagttttgaaacactgttttcgttgaatctgcaagtggatatttggctagctttgaggatttcgttggaaacgggattacatataaaaaggagacagcagcattctcagaaacttctttgtgatgtttgcattcaagtcacagagttgaacattccctttcatagagcaggtttgaaacactctttttgtagtatctggatgtggacatttggatcgctttcaggcctatggtgaaaaaggaaatatcttcccatgaaaactagacagaagcattctcagaaacttatttgtgatgtgtgccctcaactgacagtgttgaacctttgttttgatagagcagttctgaaacacactttttgtaaaatctgcaagaggatatttggatagctttgaggatttcgttggaaacgggaatgtcttcatgtaaactctagacagaagcattctcagaaactgctttgggatgtttcaattgaagtcccagtgttgaacattccctttcatagagcaggtttgaaacactctttttgtactatctggaagtggacatttggagcgctttcaggtctacggtgaaaaaggagatatcttccaataaaaactagatagaagcaatgtcagaacttttttcatgatgtatctactcagcaaacagagttgaacctttcttttgagagagcagttttgaaacactctttttgtggaatatgcaagtgggtattaggccagcttggaggatttcgttggaaacgggaatacgtataaaaagcagacagcagcattgtcagaaactactttgtgatgtttgcattcaagtcacagaattgaacactccctttcacagagcaggtttgaaacactctttttgtagtgtctgtaagtgaacatttggattgctttcaggcctaaggtgaaaaaggaaatatcttcccataaaaactagacagaagcattctcagaaacttgtttgtgatgtgtgccctctactgacagagttgaacctttctttgcaaagagcagttttgaaacactctttttgtagaatctgcaagaggatatttggatagctttgaggatttcttgggaaacgggaatgtcttcagataaactctagacagaagcattctcagaaacttctttgggatgtttcaattgaagtcacagtgttgaacattccctttcacagagcaggtttgaaacactctttttgtagtgtctataagtgaacatttggcgtgctttcaggcgtaacgtgaaaaaggaaatatctgcccataaaaactaggcagaagcattctcagaaacttgttcgtgatgagtgccctctactgacagagttgaacctttctttgcaaagagcagctttgaaacactctttttgtagaatctgcaagaggatatgtggatagctttgaggatttcgttggaaacgggtatgtcttcagataaactctagacagaagcattctcagaaacttctttgggatgtttcaattgaagtcacagtgttgaacattccctttcacagagcaggtttgaaacactctttttgtagtgtctataagtgaacatttggcgtgctttcaggcctaacgtgaaaaaggaaatatcttcccataaaaactagacagaagcattctcagaaacttgttcttgatgtgtcccctctactgacagagttgaaactttctttgcaaagagcagctttgaaacactctttttgtagaatctgcaagaggatatttggatagcttggaggatttcgttggaaacgggtatgtcttcagataaactctagacagaagcattctcagaaacttctttgggatgttgcattcaagtcacagagtagaacattcccattcatagagcagatttgaaacactctttttgtagtatctggaagtggacatttggagcgctttcaggcctatgttgaaaaaggaaatatcttcccataaaaactagacggaagcattctcagaaacttatttgtgatgtgtttgctcaactaacaggattgaaccatcgttttgaaggagcagttttgaaacactgttttcgtggaatctgcaagtggatatttggctagctttgaggatttcgttggaaacgggattacatataaaaaggagacagcagcattctcagaaacttctttgtgatgtttgcattcaagtcacagagttgaacattccctttcatagagcaggtttgaaacactctttttgtagtatctggatgtggacatttggatcgctttcaggcctatggtgaaaaaggaaatatcttcccatgaaaactagacagaagcattctcagaaacttatttgtgatgtgtgccctcaactgacagtgttgaacctttgttttgatagagcagttctgaaacacactttttgtaaaatctgcaagaggatatttggatagctttgaggatttcgttggaaacgggaatgtcttcatgtaaactctagacagaagcattctcagaaactgctttgggatgtttcaattgaagtcccagtgttgaacattccctttcatagagcaggtttgaaacactctttttgtactatctggaagtggacatttggagcgctttcaggtctacggtgaaaaaggagatatcttccaataaaaactagatagaagcaatgtcagaacttttttcatgatgtatctactcagcaaacagagttgaacctttcttttgagagagcagttttgaaacactctttttgtggaatatgcaagtgggtattaggccagcttggaggatttcgttggaaacgggaatacgtataaaaagcagacagcagcattgtcagaaactactttgtgatgtttgcattcaagtcacagaattgaacactccctttcacagagcaggttagaaacactctttttgtagtgtctgtaagtgaacatttggattgctttcaggcctaaggtgaaaaaggaaatatcttcccataaaaactagacagaagcattctcagaaacttgtttgtgatgtgtgccctctactgacagagttgaacctttctttgcaaagagcagttttgaaacactctttttgtagaatctgcaagaggatatttggatagctttgaggatttcttgggaaacgggaatgtcttcagataaactctagacagaagcattctcagcaaacttctttgggatgtttcaattgaagtcacagtgttgaacattccctttcacagagcaggtttgaaacactctttttgtagtgtctataattgaacatttggcgtgctttcaggcctaacgtgaaaaaggaaatatcttcccataaaaactagacagaagcattctcagaaacttgttcgtgatgtgtgccctctactgacagagttgaacctttctttgcaaagagcagctttgaaacactctttttgtagaatctgcaagaggatatttggatagctttgaggatttcgttggaaacgggtatgtcttcagataaactctagacagaagcattctcagaaacttctttgggatgttgcattcaagtcacagagtagaacattcccattcatagagcagatttgaaacactctttttgtagtatctggaagtggacatttggagcgctttcaggcctatgttgaaaaaggaaatatcttcccataaaaactagacggaagcattctcagaaacttatttgtgatgtgtttgctcaactaacaggattgaaccatcgttttgaaggagcagttttgaaacactgtttccgtggaatctgcaagtggatatttggctagctttgaggatttcgttggaaacgggattacatatacaaaggagacagcagcattctcagaaacttctttgtgatgtctgcattcaagtcacagagttgagcattccctttcatagagcaggttggaaacactctttttgtagtatctggatgaggacatttggagcgctttcaggcctatggtgaaaaaggaaatatcttcccgtaaaaactagacagaagcattctcagaagtttatttgtgatgtgtgccctcaactaacagagttgaacctttcttttgatagagcagttttgaaacactctttttgtaaaatctgcaagaggatatttggatagctttgaggatttcgttgcaaacgggaatggcttcatataaactctagacagaagcattctcagaaacttcgttgggatgtttcgattgaagtcccagtgttgaacattcccttttatagagcaggttggaaacactctttctgcattccctggaagtggacatttggagcgctttcaggacgacggtgaaaatggaaatatcttccaagaaaatctagatagaagcaatgtcagaaacttttatgtgatggatctactcagctaacagagttgaacctttcttttgagagagcagttttgcaacactctttttgtggaatatgcaagtggatattagggcagctttgaggatttcgtaggaaacgggaatacatgtaaaaagcagacagcagcattctcagaaacttctttgtgatgtttgcattgaagtcacagagttgaacattccctttgagagagcaggtttgaaacacgccttttgtgatatcaggaagtgtccattcggagcgcattcaggcttgtgttgaaaaaggaaatatcctcccataaaaactagacagaagcattgtcagaaacttatgtgtgatgtatgtactcaactaacagaactaaaccatcgttttgaaggagcagttttgaaacactctttttgcggaatctgcaagtggatatttggctagctgggaggatttcgttggaaacgggattacatacaaaaagcagagagcagcattctcagaaacttctttgtgatgtttgcattcaagtcacagagttgaacattccctttcatagagcaggtttgaaacactctttttgtagtatctggatgtggacatttggatcgctttcaggcctatggtgaaaaaggaaatatcttcccatgaaaactagacagaagcattctcagaaacttatttgtgatgtgtgccctcaactgacagtgttgaacctttgttttgatagagcagttctgaaacacactttttgtaaaaactgcaagaggatatttgcatagctttgaggatttcgttggaaacgggaatgtcttcatgtaaactctagacagaagcattctcagaaactgctttgggatgtttcaattgaagtcccagtgttgaacattccctttcatagagcaggtttgaaacactctttttgtactatctggaagtggacatttggagcgctttcaggtctacggtgaaaaaggagatatcttccaataaaaactagatagaagcaatgtcagaagtttttcatgatgtatctactcagcaaacagagttgaacctttcttttgagagagcagttttgaaacactctttttgtggaatatgcaagtgggtattaggccagcttggaggatttcgttggaaacgggaatacgtattaaaagcagacagcagcattgtcagaaactactttgtgatgtttgcattcaagtcacagaattgaacactccctttcacagagcaggtttgaaacactctttttgtagtgtctgtaagtgaacatttggattgctttcagacctaaggtgaaaaaggaaatatcttcccataaaaactagacagaagcattctcagaaacttgtttgtgatgtgtgccctctactgacagagttgaacctttctttgcaaagagcagttttgaaacactctttttgtagaatctgcaagaggatatttggatagctttgaggatttcttgggaaacgggaatgtcttcagataaactctagacagaagcattctcagaaacttctttgggatgtttcaattgaagtcacagtgttgaacattccctttcacagagcaggtttgaaacactctttttgtagtgtctataagtgaacatttggcgtgctttcaggcctaacgtgaaaaaggaaatatcttcccataaaaactagacagaagcattctcagaaacttgttcgtgatgtgtgccctctactgacagagttgaacctttctttgcaaagagcagctttgaaacactctttttgtagtatctgcaagaggatatttggatagctttgaggatttcgttggaaacgggtatgtcttcagataaactctagacagaagcattctcagaaacttctttgggatgttgcattcaagtcacagagtagaacattcccattcatacagcagatttgaaacactctttttgtagtatctggaagtggacatttggagcgctttcaggcctatgttgaaaaaggaaatatcttcccataaaaactagacggaagcattctcagaaacttacttgtgatgtgtttgctcaactaacagaattgaaccatcgttttgaaggagcagttttgaaacactgttttcgtggaatctgcaagtggatatttggctagctttgaggatttcgttggaaacgggattacatataaaaaggagacagccgcattctcagaaacttctttgtgatgtctgcattcaagtcacagagttgagcattccctttcatagagcaggttggaaacactctttttgtagtatctggatgaggacatttggagcgctttcaggcgtatggtgaaaaaggaaatatcttcccgtaaaaactagacagaagcattctcagaaatttatttgtgatgtgtgccctcaactaacagagttgaacctttcttttgatagagcagttttgaaacactctttttgtaaaatctgcaagaggatatttggatagctttgaggatttcgttgcaaacgggaatggcttcatataaactctagacagaagcattctcagaaacttcgttgggatgtttcgattgaagtcccagtgttgaacattcccttttatagagcaggttggaaacactctttctgcattccctggaagtggacatttggagcgctttcaggacgacggtgaaaatggaaatatcttccaagaaaatctagatagaagcaacgtcagaaacttttctgtgatggatctactcagctaacagagttgaacctttcttttgagagagcagttttgcaacactctttttgtggaatatgcaagtggatattagggcagctttgaggatttcgttggaaacgggaatacatgtaaaaagcagacagcagcattctcagaaacttctttgtgatgtttgcattgaagtcacagagttgaacattccctttgagagagcaggtttgaaacacgccttttgtcatatctggaagtgtccattcggagcgcattcaggcttgtgttgaaaaaggaaatatcctcccataaaaactagacagaagcattctcagaaacttatctgtgatgtatgtactcaactaacagaactaaaccatcgttttgaaggagcagttttgaaacactctttttgcggaatctgcaagtggatatttggctagctgggaggatttcgttggaaacgggattacatacaaaaagcagacagcagcattctcagaaacttctttgtgatgtttgcattcaagtcacagagttgaacattccctttcatagagcaggtttgaaacactctttttgtagtatctggatgtggacatttggatcgctttcaggcctatggtgaaaaaggaaatatcttcccatgaaaactagacagaagcattctcagaaacttatttgtgatgtgtgccctcaactgacagtgttgaacctttgttttgatagagcagttctgaaacacactttttgtaaaatctgcaagaggatatttggatagctttgaggatttcgttggaaacgggaatgtcttcatgtaaactctacacagaagcattctcagaaactgctttgggatgtttcaattgaagtcccagtgttgaacattcccattcatagagcaggtgtgaaacactctttttgtactatctggaagtggacatttggagcgctttcaggtctacggtgaaaaaggagatatcttccaataaaaactagatagaagcaatgtcagaacttttttcatgatgtatctactcagcaaacagagttgaacctttcttttgagagagcagttttgaaacactctttttgtggaatatgcaagtgggtattaggccagcttggaggatttcgttggaaacgggaatacgtataaaaagcagacagcagcattgtcagaaactactttgtgatgtttgcattcaagtcacagaattgaacactccctttcacagagcaggtttgaaacactctttttgtagtgtctgtaagtgaacatttggattgctttcaggcctaaggtgaaaaaggaaatatcttcccataaaaactagacagaagcattctcagaaacttgtttgtgatgtgtgccctctactgacagagttgaacctttctttgcaaagagcagttttgaaacactctttttgtagaatctgcaagaggatatttggatagctttgaggatttcttgggaaacgggaatgtcttcagataaactctagacagaagcattctcagaaacttctttgggatgtttcaattgaagtcacagtgttgaacattccctttcacagagcaggtttgaaacactctttttgtagtgtctataagtgaacatttggcgtgctttcaggcgtaacgtgaaaaaggaaatatcttcccataaaaactagacagaagcattctcagaaacttgttcgtgatgtgtgccctctactgacagagttgaacctttctttgcaaagagcagctttgaaacactctttttgtagaatctgcaagaggatatttggatagctttgaggatttcgttggaaacgggtatgtcttcagataaactctagacagaagcattctcagaaacttctttgggatgttgcattcaagtcacagagtagaacattcccattcatagagcagatttgaaacactctttttgtagtatctggaagtggacatttggagcgctttcaggcctatgttgaaaaaggaaatatcttcccataaaaactagacggaagcattctcagaaacttatttgtgatgtgtttgctcaactaacaggattgaaccatcgttttgaaggagcagttttgaaacactgttttcgtggaatctgcaagtggatatttggctagctttgaggatttcgttggaaacgggattacatataaaaaggagacagcagcattctcagaaacttctttgtgatgtctgcattcaattcacagagttgagcattccctttcctagagcacgttggaaacactctttttgtagtatctggatgaggacatttggagcgctttcaggcgtatggtgaaaaaggaaatatcttcccgtaaaaactagacagaagcattctcagaaatttatttgtgatgtgtgccctcaactaacagagttgaacctttcttttgatagagcagttttgaaacactctttttgtaaaatctgcaagaggatatttggatagctttgaggatttcgttgcaaacgggaatggcttcatataaactctagacagaagcattctcagaaacttcgttgggatgttttgattgaagtcccagtgttgaacattcccttttatagagcaggttggaaacactctttctgcattccctggaagtggacatttggagcgctttcaggacgacggtgaaaatggaaatatcttccaataaaatctagatagaagcaatgtcagaaacttttctgtgatggatctactcagctaacagagttgaacctttcttttgagagagcagttttgcaacactctttttgtggaatatgcaagtggatattagggcagctttgaggatttcgttggaaacgggaatacatgtaaaaagcagacagcagcattctcagaaacttctttgtgatgtttgcattgaagtcacagagttgaacattccctttgagagagcaggtttgaaacacgccttttgtcatatctggaattgtccattcggagcgcattcaggcttgtgttgaaaaaggaaatatcctcccagaaatactagacagaagcattctcagaaacttatctgtgatgtatgtactcaactaacagaactaaaccatcgttttgaaggagcagttttgaaacactctttttgcggaatctgcaagtggatatttggctagctgggaggatttcgttggaaacgggattacatacaaaaagcagacagcagcattctcagaaacttctttgtgatgtttgcattcaagtcacagagttgaacattccctttcatagagcaggtttgaaacactctttttgtagtatctggatgtggacatttggatcgctttcaggcctatggtgaaaaaggaaatatcttcccatgaaaactagacagaagcattctcagaaacttatttgtgatgtgtgccctcaactgacagtgttgaacctttgttttgatagagcagttctgaaacacactttttgtaaaatctgcaagaggatatttggatagctttgaggatttcgttggaaacgggaatgtcttcatgtaaactctagacagaagcattctcagaaactgctttgggatgtttcaattgaagtcccagtgttgaacattccctttcatagagcaggtttgaaacactctttttgtactatctggaagtggacatttggagaactttcaggtctacggtgaaaaaggagatatcttccaataaaaactagatagaagcaatgtcagaacttttttcatgatgtatctactcagcaaacagagttgaacctttcttttgagagagcagttttgaaacactctttttgtggaatatgcaagtgggtattaggccagcttggaggatttcgttggaaacgggaatacgtataaaaagcagacagcagcattgtcagaaactactttgtgatgtttgcattcaagtcacagaattgaacactccctttcacagagcaggtttgaaacactctttttgtagtgtctgtaagtgaacatttggattgctttcaggcctaaggtgaaaaaggaaatatcttcccataaaaactagacagaagcattctcagaaacttgtttgtgatgtgtgccctctactgacagagttgaacctttctttgcaaagagcagttttgaaacactctttttgtagaatctgcaagaggatatttggatagctttgaggatttcttgggaaacgggaatgtcttcagataaactctagacagaagcattctcagaaacttctttgggatgtttcaattgaagtcacagtgttgaacattccctttcacagagcaggtttgaaacactctttttgtagtgtctataagtaaacatttggcgtgctttcaggcgtaacgtgaaaaaggaaatatcttcccataaaaactagacagaaagcattctcagaaacttgttcgtgatgtgtgccctctactgacagagttgaacctttctttgcaaagagcagctttgaaacactctttttgtagaatctgcaagaggatatgtggatagctttgaggatttcgttggaaacgggtatgtcttcagataaactctagacagaagcattctcagaaacttctttgggatgtttcaattgaagtcacagtgttgaacattccctttcacagagcaggtttgaaacactctttttgtagtgtctataagtgaacatttggcgtgctttcaggcctaacgtgaaaaaggaaatatcttcccataaaaactagacagaagcattctcagaaacttgttcatgatgtgtgccctctactgacagagttgaacctttctttgcaaagagcagctttgaaacactctttttgtagaatctgcaagaggatatttggatagcttggaggatttcgttggaaacgggtatgtcttcagataaactctagacagaagcattctcagaaacttctttgggatgttgcattcaagtcacagagtagaacattcccattcatagagcagatttgaaacactctttttgtagtatctggaagtggacatttggagcgctttcaggcctatgttgaaaaaggaaatatcttcccataaaaactagacggaagcattctcagaaacttatttgtgatgtgtttgctcaactaacaggattgaaccatcgttttgaaggagcagttttgaaacactgttttcgtggaatctgcaagtggatatttggctagctttgaggatttcgttggaaacgggattacatataaaaaggagacagcagcattctcagaaacttctttgtgatgtctgcattcaattcacagagttgagcattccctttcatagagcagattggaaacactctttttgtagtatctggatgaggacatttggagcgctttcaggcctatggtgaaaaaggaaatatcttcccgtaaaaactagacagaagcattctcagaagtttatttgtgatgtgtgccctcaactaacagagttgaacctttcttttgatagagcagttttgaaacactctttttgtaaaatctgcaagaggatatttggatagctttgaggatttcgttgcaaacgagaatggcttcacataaactctaggcagaagcattctcagaaacttcgttgggatgtttcgattgaagtcccagtgttgaacattcccttttatagagcaggttggaaacactctttctgcattccctggaagtggacatttggagcgctttcaggacgacgatgaaaatggaaatatcttccaagaaaatctagatagaagcaacgtcagaaacttttatgtgatggatctactcagctaacagagttgaacctttcttttgagagagcagttttgcaacactctttttgtggaatatgcaagtggatattagggcagctttgaggatttcgttggaaacgggaatacatgtaaaaaggagacagcagcattctcagaaacttctttgtgatgtttgcattgaagtcacagagttgaacattccctttgagagagcaggtttgaaacacgccttttgtcatatctggaagtgtccattcggagcgcattcaggcttgtgttgaaaaaggaaatatcctcccataaaaactagacagaagcattctcagaaacttatctgtgatgtatgtactcaactaacagaactaaaccatcgttttgaaggagcagttttgaaacactctttttgcggaatctgcaagtggatatttggctagctgggaggatttcgttggaaacgggattacatacaaaaagcagacagcagcattctcagaaacttctttgtgatgtttgcattcaagtcacagagttgaacattccctttcatagagcaggtttgaaacactctttttgtagtatctggatgtggacatttggatcgctttcaggcctatggtgaaaaaggaaatatcttcccatgaaaactagacagaagcattctcagaaacttatttgtgatgtgtgccctcaactgacagtgttgaacctttgttttgatagagcagttctgaaacacactttttgtaaaatctgcaagaggatatttggatagctttgaggatttcgttggaaacgggaatgtcttcatgtaaactctagacagaagcattctcagaaactgctttgtgatgcttcaattgaagtcccagtgttgaacattccttttcatagagcaggtttgaaacactctttttgtagtatctggaagtggacatttggagcgctttcaggtctacggtgaaaaaggagatatcttccaataaaaactagacagaagcaatgtcagaacttttttcatgatgtatctactcagctaacagtagttgaacctttcttttgagagagcagttttgaaacactctttgtgtggaatatgcaagtgggtattaggccagcttggaggatttcgttggaaacgggaatacgtataaaaagcagacagcagcattgtcagaaactactttgtgatgtttgcattcaagtcacagaattgaacactccctttcacagagcaggtttgaaacactctttttgtagtgtctgtaagtgaacatttggattgctttcaggcctaaggtgaaaaaggaaatatcttcccataaaaactagacagaagcattctcagaaacttgtttgtgatgtgtgccctctactgacagagttgaacctttctttgcaaagagcagttttgaaacactctttttgtagaatctgcaagaggatatttggatagctttgaggatttcttgggaaacgggaatgtcttcagataaactctagacagaagcattctcagaaacttctttgggatgtttcaattgaagtcacagtgttgaacattccctttcacagagcaggtttgaaacactctttttgtagtgtctataagtgaacatttggcgtgctttcaggcctaacgtgaaaaaggaaatatcttcccataaaaactagacagaagcattctcagaaacttgttcgtgatgtgtgccctctactgacagagttgaacctttctttgcaaagagcagctttgaaacactctttttgtagaatctgcaagaggatatttggatagctttgaggatttcgttggaaacggggatgtcttcagataaactctagacagaagcattctcagaaacttctttgggatgttgcattcaagtcacagagtagaacattcccattcatagagcagatttgaaacactctttttgtagtatctggaagtggacatttggagcgctttcaggcctatgttgaaaaaggatatatcttcccataaaaactagacggaagcattctcagaaacttacttgtgatgtgtttgctcaactaacagaattgaaccatcgttttgaaggagcagttttgaaacactgttttcgtggaatctgcaagtggatatttggctagctttgaggatttcgttggaaacgggattacatataaaaaggagacagcagcattctcagaaacttctttgtgatgtctgcattcaattcacagagttgagcattccctttcatagagcaggttggaaacactctttttgtagtatctggatgaggacatttggagcgctttcaggcctatggtgaaaaaggaaatatcttcccgtaaaaactagacagaagcattctcagaaatttatttgtgatgtgtgccctcaactaacagagttgaacctttcttttgatagagcagttttgaaacactctttttgtaaaatctgcaagaggatatttggatagctttgaggatttcattgcaaacgggaatggcttcatataaactctagacagaagcattctcagaaacttcgttgggatgtttcgattgaagtcccagtgttgaacattcccttttatagagcaggttggaaacactctttttgcattccctggaagtggacatttggagcgctttcaggacgacggtgaaaatggaaatatcttccaataaaatctagatagaagcaatgtcagaaacttttatgtgatggatctactcagctaacagagttgaacctttcttttgagagagcagttttgcaacactctttttgtggaatatgcaagtggatattagggcagctttgaggatttcgttggaaacgggaatacatgtaaaaagcagacagcagcattctcagaaacttctttgtgatgtttgcattgaagtcacagagttgaacattccctttgagagagcaggtttgaaacacgccttttgtcatatctggaagtgtccattcggagcgcattcaggcttgtgttgaaaaaggaaatatcctcccataaaaactagacagaagcattctcagaaacttatttgtgatgtatgtactcaactaacagaactaaaccatcgttttgaaggagcagttttgaaacactctttttgcggaatctgcaagtggatatttggctagctgggaggatttcgttggaaacgggattacatacaaaaagcagacagcagcattctcagaaacttatttgtgatgtgtgccctcaactgacagtgttgaacctttgttttgatagagcagttctgaaacacactttttataaaatctgcaagaggatatttggatagctttgaggatttcgttggaaacgggaatgtcttcatgtaaactctacacagaagcattctcagaaactgctttgggatgtttaaattgaagtcccagtgttgaacattccctttcatagagcaggtttgaaacactctttttgtactatctggaagtggacatttggagcgctttcaggtctacggtgaaaaaggagatatcttccaataaaaactagatagaagcaatgtcagaacttttttcatgatgtatctactcagcaaacagagttgaacctttcttttgagagagcagttttgaaacactctttttgtggaatatgcaagtgggtattaggccagcttggaggatttcgttggaaacgggaatacgtataaaaagcagacagcagcattgtcagaaactactttgtgatgtttgcattcaagtcacagaattgaacactccctttcacagagcagttttgaaacactctttttgtagtgtctgtaagtgaacatttggattgctttcaggcctaaggtgaaaaaggaaatatcttcccataaaaactagacagaagcattctcagaaacttgtttgtgatgtgtgccctctactgacagagttgaacctttctttgcaaagagcagttttgaaacactctttttgtagaatctgcaagaggatatttggatagctttgaggatttcttgggaaacgggaatgtcttcagataaactctagacagaagcattctcagaaacttctttgggatgtttcaattgaagtcacagtgttgaacattccctttcacagagcaggtttgaaacactctttttgtagtgtctataagtgaacatttggcgtgctttcaggcctaacgtgaaaaaggaaatatcttcccataaaaactagacagaagcattctcagaaacttgttcgtgatgtgtgccctctactgacagagttgaacctttctttgcaaagagcagctttgaaacactctttttgtagaatctgcaagaggatatttggatagctttgaggatttcgttggaaacgggtatgtcttcagataaactctagacagaagcattctcagaaacttctttgggatgttgcatgcaagtcacagagtagaacattcccattcatagagcagatttgaaacactctttttgtagtatctggaagtggacatttggagcgctttcaggcctatgttgaaaaaggaaatatcttcccataaaaactagacggaagcattctcagaaacttatttgtgatgtgtttgctcaactaacaggattgaaccatcgttttgaaggagcagttttgaaacactgttttcgtggaatctgcaagtggatatttggctagctgggaggatttcgttggaaacgggattacatataaaaaggagacagcagcattctcagaaacttctttgtgatgtttgcattcaagtcacagagttgaacattccctttcatagagcaggtttgaaacactctttttgtagtatctggatgtggacatttggatcgctttcaggcctatggtgaaaaaggaaatatcttcccatgaaaactagacagaagcattctcagaaacttatttgtgatgtgtgccctcaactgacagtgttgaacctttgttttgatagagcagttctgaaacacactttttgtaaaatctgcaagaggatatttggatagctttgaggatttcgttggaaacgggaatgtcttcatgtaaactctggacagaagcattctcagaaactgctttgggatgtttcaattgaagtcccagtgttgaacattccctttcatagagcaggtttgaaacactctttttgtactatctggaagtggacatttggagcgctttcaggtctacggtgaaaaaggagatatcttccaataaaaactagatagaagcaatgtcagaacttttttcatgatgtatctactcagcaaacagagttgaacctttcttttgagagagcagttttgaaacactctttttgtggaatatgcaagtgggtattaggccagcttggaggatttcgttggaaacgggaatacgtataaaaagcagacagcagcattgtcagaaactactttgtgatgtttgcattcaagtcacagaattgaacactccctttcacagagcaggtttgaaacactctttttgtagtgtctgtaagtgaacatttggattgctttcaggcctaaggtgaaaaaggaaatatcttcccataaaaactagacagaagcattctcagaaacttgtttgtgatgtgtgccctctactgacagagttgaacctttctttgcaaagagcagttttgaaacactctttttgtagaatctgcaagaggatatttggatagctttgaggatttcttgggaaacgggaatgtcttcagataaactctagacagaagcattctcagaaacttctttgggatgtttcaattgaagtcacagtgttgaacattccctttcacagagcaggtttgaaacactctttttgtagtgtctataagtgaacatttggcgtgctttcaggcctaacgtgaaaaaggaaatatcttcccataaaaactagacagaagcattctcagaaacttgttcgtgatgtgtgccctctactgacagagttgaacctttctttgcaaagagcagctttgaaacacactttttgtagaatctgcaagaggatatttggatagcttggaggatttcgttggaaacgggtatgtcttcagataaactctagacagaagcattctcagaaacttctttgggatgttgcattcaagtcacagagtagaacattcccattcatagagcagatttgaaacactctttttgtagtatctggaagtggacatttggagcgctttcaggcctatgttgaaaaaggaaatatcttcccataaaaactagacggaagcattctcagaaacttatttgtgatgtgtttgctcaactaacaggattgaaccatcgttttgaaggagcagttttgaaacactgttttcgtggaatctgcaagtggatatttggctagctttgaggatttcgttggaaacgggattacatataaaaaggagacagcagcattctcagaaacttctttgtgatgtctgcattcaattcacagagttgagcattccctttcatagagcaggttggaaacactctttttgtagtatctggatgaggacatttggagcgctttcaggcgtatggtgaaaaaggaaatatcttcccgtaaaaactagacagaagcattctcagaagtttatttgtgatgtgtgccctcaactaacagagttgaacctttcttttgatagagcagttttgaaacactctttttgtaaaatctgcaagaggatatttggatagttttgaggatttcgttgcaaacgggaatggcttcatataaactctagacagaagcattctcagaaacttcgttgggatgtttcgattgaagtcccagtgttgaacattcccttttatagagcaggttggaaacactctttctgcattccctggaagtggacatttggagcgctttcaggacgacggtgaaaatggaaatatcttccaagaaaatctagatagaagcaacgtcagaaacttttctgtgatggatctactcagctaacagagttgaacctttcttttgagagagcagttttgcaacactctttttgtggaatatgcaagtggatattagggcagctttgaggatttcgttggaaacgggaatacatgtaaaaagcagacagcagcattctcagaaacttctttgtgatgtttgcattgaagtcacagagttgaacattccctttgagagagcaggtttgaaacacgccttttgtcatatctggaagtgtccattcggagcgcattcaggcttgtgttgaaaaaggaaatatcctcccataaaaactagacagaagcattctcagaaacttatttgtgatgtatgtactcaagtaacagaactaaaccatcgttttgaaggagcagttttgaaacactctttttgcggaatctgcaagtggatatttggctagctgggaggatttcgttggaaacgggattacatacaaaaagcagacagcagcattctcagaaacttatttgtgatgtgtgccctcaactgacagtgttgaacctttgttttgatagagcagttctgaaacacactttttgtaaaatctgcaagaggatatttggatagctttgaggatttcgttggaaacgggaatgtcttcatgtaaactctagacagaagcattctcagaaactgctttgggatgtttcaattgaagtcccagtgttgaacattccctttcatagagcaggtttgaaacactctttttgtagtatgtggaagtggacatttggagcgctttcaggtctacggtgaaaaaggagatatcttccaataaaaactagatagaagcaatgtcagaactttttttcatgatgtatctactcagcaaacagagttgaacctttcttttgagagagcagttttgaaacactctttttgtggaatatgcaagtgggtattaggccagcttggaggatttcgttggaaacgggaatacgtataaaaagcagacagcagcattgtcagaaactactttgtgatgtttgcattcaagtcacagaattgaacactccctttcacagagcaggtttgaaacactctttttgtagtgtctgtaagtgaacatttggattgctttcaggcctaaggtgaaaaaggaaatatcttcccataaaaactagacagaagcattctcagaaacttgtttgtgatgtgtgccctctactgacagggttgaacctttctttgcaaagagcagttttgaaacactctttttgtagaatctgcaagaggatatttggatagctttgaggatttcttgggaaacgggaatgtcttcagataaactctagacagaagcattctcagaaacttctttgggatgtttcaattgaagtcacagtgttgaacattccctttcacagagcaggtttgaaacactctttttgtagtgtctataagtgaacatttggcgtgctttcaggcctaacgtgaaaaaggaaatatcttcccataaaaactagacagaagcattctcagaaacttgttcgtgatgtgtgccctctactgacagagttgaacctttctttgcaaagagcagctttgaaacacactttttgtagaatctgcaagaggatatttggatagctttgaggatttcgttggaaacgggtatgtcttcagataaactctagacagaagcattctcagaaacttctttgggatgttgcattcaagtcacagagtagaacattcccattcatagagcagatttgaaacactctttttgtagtatctggaagtggacatttggagcgctttcaggcctatgttgaaaaaggaaatatcttcccataaaaactagacggaagcattctcagaaacttatttgtgatgtgtttgctcaactaacaggattgaaccatcgttttgaaggagcagttttgaaacactgttttcgtggaatctgcaagtggatatttggctagctttgaggatttcgttggaaacgggattacatataaaaaggagacagcagcattctcagaaacttccttgtgatgtttgcattcaattcacagagttgagcattccctttcatagagcaggtttgaaacactctttttgtagtatctggatgtggacatttggatcgctttcaggcctatggtgaaaaaggaaatatcttcccatgaaaactagacagaagcattctcagaaacttatttgtgatgtgtgccctcaactgacagtgttgaacctttgttttgatagagcagttctgaaacacaccttttgtaaaatctgcaagaggatatttggatagctttgaggatttcgttggaaacgggaatgtcttcatgtaaactctagacagaagcattctcagaaactgctttgggatgtttcaattgaagtcccagtgttgaacattccctttcatagagcaggtttgaaacactctttttgtactatctggaagtggacatttggagcgctttcaggtctacggtgtaaaaggagatatcttccaataaaaactagatagaagcaatgtcagaacttttttcatgatgtatctactcagcaaacagagttgaacctttcttttgagagagcagttttgaaacactctttttgtggaatatgcaagtgggtattaggccagcttggaggatttcgttggaaacgggaatacgtataaaaagcagacagcagcattgtcagaaactactttgtgatgtttgcattcaagtcacagaattgaacactccctttcacagagcaggtttgaaacactctttttgtagtgtctgtaagtgaacatttggattgctttcaggcctaaggtgaaaaaggaaatatcttcccataaaaactagacagaagcattctcagaaacttgtttgtgatgtgtgccctctactgacagagttgaacctttctttgcaaagagcagttttgaaacactcttttgtagaatctgcaagaggatatttggatagctttgaggatttcttgggaaacgggaatgtcttcagataaactctagacagaagcattctcagaaacttctttgggatgtttcaattgaagtcacagtgttgaacattccctttcacagagcaggtttgaaacactctttttgtagtgtctataagtgaacatttggcgtgctttcaggcgtaacgtgaaaaaggaaatatcttcccataaaaaccagacagaagcattctcagaaacttgttcgtgatgtgtgccctctactgacagagttgaacctttctttgcaaagagcagctttgaaacactctttttgtagaatctgcaagaggatatttggatagctttgaggatttcgttggaaacggggatgtcttcagataaactctagacagaagcattctcagaaacttctttgggatgttgcattcaagtcacagagtagaacattcccattcatagagcagatttgaaacactctttttgtagtatctggaagtggacatttggagcgctttcaggcctatgttgaaaaaggatatatcttcccataaaaactagacggaagcattctcagaaacttacttgtgatgtgtttgctcaactaacagaattgaaccatcgttttgaaggagcagttttgaaacactgttttcgtggaatctgcaagtggatatttggctagctttgaggatttcgttggaaacgggattacatataaaaaggagacagcagcattctcagaaacttctttgtgatgtctgcattcaagtcacagagttgagcattccctttcatagagcaggttggaaacactctttttgtagtatctggatgaggacatttggagcgctttcaggcgtatggtgaaaaaggaaatatcttcccgtaaaaactagacagaagcattctcagaaatttatttgtgatgtgtgccctcaactaacagagttgaacctttcttttgatagagcagttttgaaacactctttttgtaaaatctgcaagaggatatttggatagctttgaggatttcgttgcaaacgggaatggcttcatataaactctagacagaagcattctcagaaacttcgttgggatgtttcgattgaagtcccagtgttgaacattcccttttatagagcaggttggaaacactctttctgcattccctggaagtggacatttggagcgctttcaggacgacggtgaaaatggaaatatcttccaagaaaatctagatagaagcaacgtcagaaacttttatgtgatggatctactcagctaacagagttgaacctttcttttgagagagcagttttgcaacactctttttgtggaatatgcaagtggatattagggcagctttgaggatttcgttggaaacgggaatacatgtaaaaagcagacagcagcattctcagaaacttctttgtgatgtttgcattgaagtcacagagttgaacattccctttgaaagagcaggtttgaaacacgccttttgtcatatctggaagtgtccattcggagcgcattcaggcttgtgttgaaaaaggaaatatcctcccataaaaactagacagaagcattctcagaaacttatctgtgatgtatgtactcaactaacagaactaaaccatcgttttgaaggagcagttttgaaacactctttttgcggaatctgcaagtggatatttggctagctgggaggatttcgttggaaacgggattacatacaaaaagcagacagcagcattctcagaaacttctttgtgatgtttgcattcaagtcacagagttgaacattccctttcatagagcaggtttgaaacactctttttgtagtatctggatgtggacatttggatcgctttcaggcctatggtgaaaaaggaaatatcttcccatgaaaactagacagaaagcattctcagcaaacttatttgtgatgtgtgccctcaactgacagtgttgaacctttgttttgatagagcagttttgaaacacactttttgtaaaatctgcaagaggatatttggatagctttgaggatttcgttggaaacgggaatgtcttcatgtaaactctagacagaagcattctcagaaactgctttgggatgtttcaattgaagtcccagtgttgaacattcccattcatagagcaggtttgaaacactctttttgtactatctggaagtggacatttggagcgctttcaggtctacggtgaaaaaggagatatcttccaataaaaactagatagaagcaatgtcagaacttttttcatgatgtatctactcagctaacagagttgaacctttcttttgagagagcagttttgaaacactctttttgtggaatatgcaagtgggtattaggccagcttggaggatttcgttggaaacgggaatacgtataaaaagcagacagcagcattgtcagaaactactttgtgatgtttgcattcaagtcacagaattgaacactccctttcacagagcaggtttgaaacactctttttgtagtgtctgtaagtgaacatatggattgctttcaggcctaaggtgaaaaaggaaatatcttcccataaaaactagacagaagcattctcagaaacttgtttgtgatgtgtgccctctactgacagagttgaacctttctttgcaaagagcagttttgaaacactctttttgtagaatctgcaagaggatatttggatagctttgaggatttcttgggaaacgggaatgtcttcagataaactctagacagaagcattctcagaaacttctttgggatgtttcaattgaagtcacagtgttgaacattccctttcacagagcaggtttgaaacactctttttgtagtgtctataagtgaacatttggcgtgctttcaggcgcaacgtgaaaaaggaaatatcttcccataaaaactagacagaagcattctcagaaacttgttcgtgatgtgtgccctctactgacagacttgaacctttctttgcaaagagcagctttgaaacactctttttgtagaatctgccagaggatatttggatagcttggaggatttcgttggaaacgggtatgtcttcagataaactctagacagaagcattctcagaaacttctttgggatgttgcattcaagtcacagagtagaacattcccattcatagagcagatttgaaacactctttttgtagtatctggaagtggacatttggagcgctttcaggcctatgttgaaaaaggaaatatcttcccataaaaactagacggaagcattctcagaaacttacttgtgatgtgtttgctcaactaacagaattgaaccatcgttttgaaggagcagttttgaaacactgttttcgtggaatctgcaagtggatatttggctagctttgaggatttcgttggaaacgggattacatataaaaaggagacagcagcattctcagaaacttctttgtgatgtctgcattcaattcacagagttgagcattccctttcatagagcaggttggaaacactctttttgtagtatctggatgaggacatttggagcgctttcaggcgtatggtgaaaaaggaaatatcttcccgtaaaaactagacagaagcattctcagaaatttatttgtgatgtgtgccctcaactaacagagttgaacctttcttttgatagagcagttttgaaacactctttttgtaaaatctgcaagaggatatttggatagctttgaggatttcattgcaaatgggaatggcttcatataaactctagacagaagcattctcagaaacttcgttgggatgtttcgattgaagtcccagtgttgaacattcccttttatagagcaggttggaaacagtctttctgcattccctggaagtggacatttggagcgctttcaggacgacggtgaaaatggaaatatcttccaataaaatctggatagaagcaatgtcagaaacttttatgtgatggatctactcagctaacagagttgaacctttcttttgagagagcagttttgcaacactctttttgtggaatatgcaagtggatattagggcagctttgaggatttcgttggaaacgggaatacatgtaaaaagcagacagcagcattctcagaaacttctttgtgatgtttgcattgaagtcacagagttgaacattccctttgagagagcaggtttgaaacacgccttttgtcatatctggaagtgtccattcggagcgcattcaggcttgtgttgaaaaaggaaatatcctcccataaaaactagacagaagcattctcagaaacttatctgtgatgtatgtactcaactaacagaactaaaccatcgttttgaaggagcagttttgaaacactctttttgcggaatctgcaagtggatatttggctagctgggaggatttcgttggaaacgggattacatacaaaaagcagacagcagcattctcagaaacttctttgtgatgtttgcattcaagtcacagagttgaacattccctttcatagagcaggtttgaaacactctttttgtagtatctggatgtggacatttggatcgctttcaggcctatggtgaaaaaggaaatatcttcccatgaaaactagacagaagcattctcagaaacttatttgtgatgtgtgccctcaactgacagtgttgaacctttgttttgatagagcagttctgaaacacactttttgtaaaatctgcaagaggatatttggatagctttgaggatttcgttggaaacgggaatgtcttcatgtaaactctacacagaagcattctcagaaactgctttgggatgtttcaattgaagtcccagtgttgaacattcccattcatagagcaggtttgaaacactctttttgtaatatctggaagtggacatttggagcgctttcaggtctacggtgaaaaaggagatatcttccaataaaaactagatagaagcaatgtcagaacttttttcatgatgtatctactcagcaaacagagttgaacctttcttttgagagagcagttttgaaacactctttttgtggaatatgcaagtgggtattaggccagcttggaggatttcgttggaaacgggaatacgtataaaaagcagacagcagcattgtcagaaactactttgtgatgtttgcattcaagtcacagaattgaacactccctttcacagagcaggtttgaaacactctttttgtagtgtctgtaagtgaacatttggattgctttcaggcctaaggtgaaaaaggaaatatcttcccataaaaactagacagaagcattctcagaaacttgtttgtgatgtgtgccctctactgacagagttgaacctttctttgcaaagagcagttttgaaacactctttttgtagaatctgcaagaggatatttggatagctttgaggatttcttgggaaacgggaatgtcttcagataaactctagacagaagcattctcagaaacttctttgggatgtttcaattgaagtcacagtgttgaacattccctttcacagagcaggtttgaaacactctttttgtagtgtctataagtgaacatttggcgtgctttcaggcctaacgtgaaaaaggaaatatcttcccataaaaactagacagaagcattctcagaaacttgttcctgatgtgtgccctctaactgacagagttgaacctttctttgcaaagagcagctttgaaacactctttttgtagaatctgcaagaggatatttggatagctttgaggatttcgttggaaacggggatgtcttcagataaactctagacagaagcattctcagaaacttctttgggatgttgcattcaagtcacagagtagaacattcccattcatagagcagatttgaaacactctttttgtagtatctggaagtggatatttggagcgctttcaggcctatgttgaaaaaggaaatatcttcccataaaaactagacggaagcattctcagaaacttacttgtgatgtgtttgctcaactaacagaattgaaccatcgttttgaaggagcagttttgaaacactgttttcgtggaatctgcaagtggatatttggctagctttgaggatttcgttggaaacgggattacatataaaaaggagacagcagcattctcagaaacttctttgtgatgtctgcattcaagtcacagagttgagcattccctttcatagagcaggttggaaacactctttttgtagtatctggatgaggacatttggagcgctttcaggcgtatggtgaaaaaggaaatatcttcccgtaaaaactagacagaagcattctcagaaatttatttgtgatgtgtgccctcaactaacagagttgaacctttcttttgatagagcagttttgatacactctttttgtaaaatctgcaagaggatatttggatagctttgaggatttcgttgcaaacgggaatggcttcatataaactctagacagaagcattctcagaaacttcgttgggatgtttcgattgaagtcccagtgttgaacattcccttttatagagcaggttggaaacactctttctgcattccctggaagtggacatttggagcgctttcaggacgacggtgaaaatggaaatatcttccaataaaatctagatagaagcaacgtcagaaacttttatgtgatggatctactcagctaacagagttgaacctttctttagagagagcagttttgcaacactctttttgtggaatatgcaagtggatattagggcagctttgaggatttcgttggaaacgggaatacatgtaaaaagcagacagcagcatgctcagaaacttctttgtgatgtttgcattgaagtcacagagttgaacattctctttgagagagcaggtttgaaacacgccttttgtcatatctggaagtgtccattcggagcgcattcaggcttgtgttgaaaaaggaaatatcctcccataaaaactagacagaagcattctcagaaacttatctgtgatgtatgtactcaactaacagaactaaaccatcgttttgaaggagcagttttgaaacactctttttgcggaatctgcaagtggatatttggctagctgggaggatttcgttggaaacgggattacatacaaaaagcagacagcagcattctcagaaacttctttgtgatgtttgcattcaagtcacagagttgaacattccctttcatagagcaggtttgaaacactctttttgtagtatctggatgtggacatttggatcgctttcaggcctatggtgaaaaaggaaatatcttcccatgaaaactagacagaagcattctcagaaacttatttgtgatgtgtgccctcaactgacagtgttgaacctttgttttgatagagcagttctgaaacacactttttgtaaaatctgcaagaggatatttggatagctttgaggatttcgttggaaacgggaatgtcttcatgtaaactctagacagaagcattctcagaaactgctttgggatgtttcaattgaagtcccagtgttgaacattccctttcatagagcaggtttgaaaccctctttttgtactatctggaagtggacatttggagcgctttcaggtctacggtgaaaaaggagatatcttccaataaaaactagatagaagcaatgtcagaacttttttcatgatgtatctactcagcaaacagagttgaacctttcttttgagagagcagttttgaaacactctttttgtggaatatgcaagtgggtattaggccagcttggaggatttcgttggaaacgggaatacgtataaaaagcagacagcagcattgtcagaaactactttgtgatgtttgcattcaagtcacagaattgaacactccctttcacagagcaggtttgaaacactctttttgtagtgtctataagtgaacatttggcgtgctttcaggcctaaggtgaaaaaggaaatatcttcccataaaaactagacagaagcattctcagaaacttgtttgtgatgtgtgccctctactgacagagttgaaactttctttgcaaagagcagttttgaaacactctttttgtagaatctgcaagaggatatttggatagctttgaggatttcttgggaaacgggaatgtcttcagataaactctagacagaagcattctcagaaacttctttgggatgtttcaattgaagtcagtgttgaacattccctttcacagagcaggtttgaaacactctttttgtagtgtctataagtgaacatttggcgtgctttcaggcgtaacgtgaaaaaggaaatatcttcccataaaaactagacagaagcattctcagaaacttgttcgtgatgtgtgccctctactgacagagttgaacctttctttgcaaagagcagctttgaaacactctgtttgtagaatctgcaagaggatatttggatagctttgaggatttcgttggaaacgggtatgtcttcagataaactctagacagaagcattctcagaaacttctttgggatgttgcattcaagtcacagagtagaacattcccattcatagagcagatttgaaacactctttttgtagtatctggaagtggacatttggagcgctttcaggcctatgttgaaaaaggaaatatcttcccataaaaactagacggaagcattctcagaaacttatttgtgatgtgtttgctcaactaacaggattgaaccatcgttttgaaggagcagttttgaaacactgttttcgtggaatctgcaagtggatatttggctagctttgaggatttcgttggaaacgggattacatatacaaaggagacagcagcattcccagaaacttctttgtgatgtctgcattcaattcacagagttgagcattccctttcatagagcaggttggaaacactctttttgtagtatctggatgaggacatttggagcgctttccggcctatggtgaaaaaggaaatatcttcccgtaaaaactagacagaagcattctcagaagtttatttgtgatgtgtgccctcaactaacagagttgaacctttcttttgatagagcagttttgaaacactctttttgtaaaatctgcaagaggatatttggacagctttgaggatttcgttgcaaacgggaatggcttcatataaactctagacagaagcattctcagaaacttcgttgggatgtttcgattgaagtcccagtgttgaacattcccttttatagagcaggttggaaacactctttctgcattccctggaagtggacatttggagcgctttcaggacgacggtgaaaatggaaatatcttccaagaaaatctagatagaagcaatgtcagaaacttttatgtgatggatctactcagctaacagagttgaagctttcttttgagagagcagttttgcaacactctttttgtggaatatgcaagtggatattagggcagctttgaggatttcgttggaaacgggaatacatgtaaaaagcagacagcagcattctcagaaacttctttgtgatgtttgcattgaagtcacagagttgaacattccctttgagagagcaggtttgaaacacgccttttgtcatatctggaagtgtccattcggagcgcattcaggcttgtgttgaaaaaggaaatatcctcccataaaaactagacagaagcattctcagaaacttatctgcgatgtatgtactcaactaacagaactaaaccatcgttttgaaggagcagttttgaaacactctttttgcggaatctgcaagtggatatttggctagctgggaggatttcgttggaaacgggattacatacaaaaagcagacagcagcattctcagaaacttctttgtgatgtttgcattcaagtcacagagttgaacattccctttcatagagcaggtttgaaacactctttttgtagtatctggatgtggacatttggatcgctttcaggcctatggtgaaaaaggaaatatcttcccatgaaaactagacagaagcattctcagaaacttatttgtgatgtgtgccctcaactgacagtgttgaacctttgttttgatagagcagttctgaaacacactttttgtaaaatctgcaagaggatatttggatagctttgaggatttcgttggaaacgggaatgtcttcatgtaaactctacacagaagcattctcagaaactgctttgggatgtttcaattgaagtcccagtgttgaacattcccattcatagagcaggtttgaaacacactttttgtactatctggaagtggacatttggagcgctttcaggtctacggtgaaaaaggagatatcttccaataaaaactagatagaagcaatgtcagaacttttttcatgatgtatctactcagctaacagtagttgaacctttcttttgagagagcagttttgaaacactctttgtgtggaatatgcaagtgggtattaggccagcttggaggatttcgttggaaacgggaatacgtataaaaagcagacagcagcattgtcagaaactactttgtgatgtttgcattcaagtcacagaattgaacactccctttcacagagcaggtttgaaacactctttttgtagtgtctgtaagtgaacatatggattgctttcaggcctaaggtgaaaaaggaaatatcttcccataaaaactagacagaagcattctcagaaacttgtttgtgatgtgtgccctctactgacagagttgaacctttctttgcaaagagcagttttgaaacactctttttgtagaatctgcaagaggatatttggatagctttgaggatttcttgggaaacgggaatgtcttcagataaactctagacagaagcatactcagaaacttctttgggacgtttcaattgaagtcacagtgttgaacattccctttcacagagcaggtttgaaacactctttttgtagtgtctataagtgaacatttggcgtgctttcaggcctaacgtgaaaaaggaaatatcttcccataaaaactagacagaagcattctcagaaacttgttcatgatgtgtgccctctactgacagagttgaacctttctttgcaaagagcagctttgaaacactctttttgtagaatctgcaagaggatatttggatagctttgaggatttcgttggaaacgggtatgtcttcagataaactctagacagaagcattctcagaaacttctttgggatgttgcattcaagtcacagagtagaacattcccattcatagagcagatttgaaacactctttttgtagtatctggaagtggacatttggagcgctttcaggcctatgttgaaaaaggaaatatcttcccataaaaactagacggaagcattctcagaaacttacttgtgatgtgtttgctcaactaacagaattgaaccatcgttttgaaggagcagttttgaaacactgttttcgtggaatctgcaagtggatatttggctagctttgaggatttcgttggaaacgggattacatataaaaaggagacagcagcattctcagaaacttctttgtgatgtctgcattcaagtcacagagttgagcattccctttcatagagcaggttggaaacactctttttgtagtatctggatgaggacatttggagcgctttcaggcgtatggtgaaaaaggaaatatcttcccgtaaaaactagacagaagcattctcagaaatttatttgtgatgtgtgccctcaactaacagagttgaacctttcttttgatagagcagttttgaaacactctttttgtaaaatctgcaagaggatatttggatagctttgaggatttcgttgcaaacgggaatggcttcatataaactcctagacagaagcattctcaagaaacttcgttgggatgtttcgattgaagtcccagtgttgaacattcccttttatagagcaggttggaaacactctttctgcattccctggaagtggacatttggagcgctttcaggacgacggtgaaaatggaaatatcttccaagaaaatctagatagaagcaacgtcagaaacttttctgtgatggatctactcagctaacagagttgaacctttcttttgagagagcagttttgcaacactctttttgtggaatatgcaagtggatattagggcagctttgaggatttcgttggaaacgggaatacatgtaaaaagcagacagcagcattctcagaaacttctttgtgatgtttgcattgaagtcacagagttgaacattccctttgagagagcaggtttgaaacacgccttttgtcatatctggaagtgtccattcggagcgcattcaggcttgtgttgaaaaaggaaatatcctcccataaaaactagacagaagcattctcagaaacttatctgtgatgtatgtactcaactaacagaactaaaccatcgttttgaaggagcagttttgaaacactctttttgcggaatctgcaagtggatatttggctagctgggaggatttcgttggaaacgggattacatacaaaaagcagacagcagcattctcagaaacttctttgtgatgtttgcattcaagtcacagagttgaacattccctttcatagagcaggtttgaaacactctttttgtagtatctggatgtggacatttggatcgctttcaggcctatggtgaaaaaggaaatatcttcccatgaaaactagacagaagcattctcagaaacttatttgtgatgtgtgccctcaactgacagtgttgaacctttgttttgatagagcagttctgaaacacactttttgtaaaatctgcaagaggatatttggatagctttgaggatttcgttggaaacgggaatgtcttcatgtaaactctacacagaagcattctcagaaactgctttgggatgtttcaattgaagtcccagtgttgaacattcccattcatagagcaggtttgaagcactctttttgtactatctggaagtggacatttggagcgctttcaggtctacggtgaaaaaggagatatcttccaataaaaactagatagaagcaatgtcagaacttttttcatgatgtatctactcagcaaacagagttgaacctttcttttgagagagcagttttgaaacactctttttgtggaatatgcaagtgggtattaggccagcttggaggatttcgttggaaacgggaatacgtataaaaagcagacagcagcattgtcagaaactactttgtgatgtttgcattcaagtcacagaactgaacactccctttcacagagcaggtttgaaacactctttttgtagtgtctgtaagtgaacatttggattgctttcaggcctaaggtgaaaaaggaaatatcttcccataaaaactagacagaagcattctcagaaacttgtttgtgatgtgtgccctctactgacagagttgaacctttctttgcaaagagcagttttgaaacactctttttgtagaatctgcaagaggatatttggatagctttgaggatttcttgggaaacgggaatgtcttcagataaactctagacagaagcattctcagaaacttctttgggatgtttcaattgaagtcacagtgttgaacattccctttcacagagcaggtttcaaacactctttttgtagtgtctataagtgaacatttggcgtgctttcaggcctaacgtgaaaaaggaaatatcttcccataaaaactagacagaagcattctcagaaacttgttcgtgatgtgtgccctctactgacagagttgaacctttctttgcaaagagcagctttgaaacacactttttgtagaatctgcaagaggatatttggatagctttgaggatttcgttggaaacgggtatgtcttcagataaactctagacagaagcattctcagaaacttctttgggatgttgcatgcaagtcacagagtagaacattcccattcataaatcagatttgaaacactctttttgtagtatctggaagtggacatttggagcgctttcaggcctatgttgaaaaaggaaatatcttcccataaaaactagacggaagcattctcagaaacttatttgtgatgtgtttgctcaactaacaggattgaaccatcgttttgaaggagcagttttgaaacactgttttcgtggaatctgcaagtggatatttggctagctttgaggattttgttggaaacgggattacatataaaaaggagacagcagcattctgagaaacttctttgtgatgtctgcattcaattcacagagttgagcattccctttcatagagcaggttggaaacactctttttgtagtatctggatgtggacatttggatcgctttcaggcctatggtgaaaaaggaaatatcttcccatgaaaactagacagaagcattctcagaaatttatttgtgatgtgtgccctcaactaacagagttgaacctttcttttgatagagcagttttgaaacactctttttgtaaaatctgcaagaggatatttggatagctttgaggatttcgttgcaaacgggaatggcttcatataaactctagacagaagcattctcagaaacttcgttgggatgtttcgattgaagtcccagtgttgaacattcccttttatagagcaggttggaaacactctttctgcattccctggaagtggacatttggagcgctttcaggacgacggtgaaaatggaaatatcttccaagaaaatctagatagaagcaacgtcagaaacttttatgtgatggatctactcagctaacagagttgaacctttcttttgagagagcagttttgcaacacactttttgtggaatatgcaagtggatattagggcagctttgaggatttcgttggaaacgggaatacatgtaaaaagcagacagcagcattctcagaaacttctttgtgatgtttgcattgaagtcacagagttgaacattccctttgagagagcaggtttgaaacacgccttttgtcatatctggaagtgtccattcggagcgcattcaggcttgtgttgaaaaaggaaatatcctcccataaaaactagacagaagcattctcagaaacttatctgtgatgtatgtactcaactaacagaactaaaccatcgttttgaaggagcagttttgaaacactctttttgcggaatctgcaagtggatatttggctagctgggaggatttcgttggaaacgggattacatacaaaaagcagacagcagcattctcagaaacttctttgtgatgtttgcattcaagtcacagagttgaacattccctttcatagagcaggtttgaaacactctttttgtagtatctggatgtggacatttggatcgctttcaggcctatggtgaaaaaggaaatatcttcccatgaaaactagacagaagcattctcagaaacttatttgtgatgtgtgccctcaactgacagtgttgaacctttgttttgatagagcagttctgaaacacactttttgtaaaatctgcaagaggatatttggatagctttgaggatttcgttggaaacgggaatgtcttcatgtaaactctacacagaagcattctcagaaactgctttgggatgtttcaattgaagtcccagtgttgaacattccctttcatagagcaggtttgaaaccctctttttgtactatctggaagtggacttttggagccctttcaggtctacggtgaaaaaggagatatcttccaataaaaactagatagaagcaatgtcagaacttttttcatgatgtatctactcagcaaacagagttgaacctttcttttgagagagcagttttgacactgtctttgtggaatatgcaagtgggtattaggccagcttggaggatttcgttggaaacgggaatacgtataaaaagcagacagcagcattgtcagaaactactttgtgatgtttgcattcaagtcacagaattgaacactccctttcacagagcaggtttgaaacactctttttgtagtgtctgtaagtgaacatttggattgctttcaggcctatggtgaaaaaggtaatatcttcccataaaaactagacagaagcattctcagaaacttgtttgtgatgtgtgccctctactgacagagttgaacctttctttgcaaagagcagttttgaaacactctttttgtagaatctgcaagaggatatttggatagctttgaggatttcttgggaaacgggaatgtcttcagataaactctagacagaagcattctcagaaacttctttgggatgtttcaattgaagtcacagtgttgaacattccctttcacagagcaggtttggaacactctttttgtagtgtctataagtgaacatttggcgtgctttcaggcctaacgtgaaaaaggaaatatcttcccataaaaactagacggaagcattctcagaaacttgttcgtgatgtgtgccctctactgacagagttgaacctttctttgcaaagagcagctttgaaacacactttttgtagaatctgcaagaggatatttggatagcttggaggatttcgttggaaacgggtatgtcttcagataaactctagacagaagcattctcagaaacttctttgggatgttgcattcaagtcacagagtagaacattcccattcatagagcagatttgaaacactctttttgtagtatctggaagtggacatttggagcgctttcaggcctatgttgaaaaaggaaatatcttcccataaaaactagacggaagcattctcagaaacttatttgtgatgtgtttgctcaactaacaggattgaaccatcgttttgaaggagcagttttgaaacactgttttcgtggaatctgcaggtggatatttggctagctttgaggatttcgttggaaacgggattacatataaaaaggagacagcagcattctcagaaacttctttgtgatgtctgcattcaattcacagagttgagcattccctttcatagagcaggttggaaacactctttttgtagtatctggatgaggacatttggagcgctttcaggcgtatggtgaaaaaggaaatatcttcccgtaaaaactagacagaagcattctcagaagtttatttgagatgtgtgccctcaactaacagagttgaacctttcttttgatagagcagttttgaaacactctttttgtaaaatctgcaagaggatatttggatagctttgaggatttcgttgcaaacgggaatggcttcatataaactctagacagaagcattctcagaaacttcgttgggatgttttgattgaagtcccagtgttgaacattcccttttatagagcaggttggaaacactctttctgcattccctggaagtggacatttggagcgctttcaggacgacggtgaaaatggaaatatcttccaagaaaatctagatagaagcaatgtcagaaacttttatgtgatggatctactcagctaacagagttgaacctttcttttgagagagcagttttgcaacactctttttgtggaatatgcaagtggatattagggcagctttgaggatttcgttggaaacgggaatacatgtaaaaagcagacagcagcattctcagaaacttctttgtgatgtttgcattgaagtcacagagttgaacattccctttgagagagcaggtttgaaacacgccttttgtcatatctggaagtgtccattcggagcgcattcaggcttgtgttgaaaaaggaaatatcctcccataaaaactagacagaagcattctcagaaacttatctgtgatgtatgtactcaactaacagaactaaaccatcgttttgaaggagcagttttgaaacactctttttgcggaatctgcaagtggatatttggctagctgggaggatttcgttggaaacgggattacatacaaaaagcagacagcagcattctcagaaacttctttgtgatgtttgcattcaagtcacagagttgaacattccctttcatagagcaggtttgaaacactctttttgtagtatctggatgtggacatttggatcgctttcaggcctatggtgaaaaaggaaatatcttcccatgaaaactagacagaagcattctcagaaacttatttgtgatgtgtgccctcaactgacagtgttgaacctttgttttgatagagcagttctgaaacacactttttgtaaaatctgcaagaggatatttggatagctttgaggatttcgttggaaacgggaatgtcttcatgtaaactctacacagaagcattctcagaaactgctttgggatgtttcaattgaagtcccagtgttgaacattcccattcatagagcaggtttgaaacactctttttgtactatctggaagtggacatttggagcgctttcaggtctacggtgaaaaaggagatatcttccaataaaaactagatagaagcaatgtcagaacttttttcatgatgcatctactcagctaacagagttgaacctttcttttgagagagcagttttgaaacactctttgtgtggaatatgcaagtgggtattaggccagcttggaggatttcgttggaaacgggaatacgtataaaaagcagacagcagcattgtcagaaactactttgtgatgtttgcattcaagtcacagaattgaacactccctttcacagagcaggtttgaaacactctttttgtagtgtctgtaagtgaacatatggattgctttcaggcctaaggtgaaaaaggaaatatcttcccataaaaactagacagaagcattctcagaaacttgtttgtgatgtgtgccctctactgacagagttgaacctttctttgcaaagagcagttttgaaacactctttttgtagaatctgcaagaggatatttggatagctttgaagatttcttgggaaacgggaatgtcttcagataaactctagacagaagcattctcagaaacttctttgggatgtttcaattgaagtcacagtgttgaacattccctttcacagagcaggtttgaaacactctttttgtagtgtctataagtgaacatttggcgtgctttcaggcctaaggtgaaaaaggaaatatacttcccataaaaactagacagaagcattctcagaaacttgttcatgatgtgtgccctctactgacagagttgaacctttctttgcaaagagcagctttgaaacactctttttgtagaatctgcaagaggatatttggatagcttggaggatttcgttggaaacgggtatgtcttcagataaactctagacagaagcattctcagaaacttcattgggatgttgcattcaagtcacagagtagaacattcccattcatagagcagatttgaaacactctttttgtagtatctggaagtggacatttggagcgctttcaggcctatgttgaaaaaggaaatatcttcccataaaaactagacggaagcattctcagaaacttatttgtgatgtgtttgctcaactaacaggattgaaccatcgttttgaaggagcagttttgaaacactgttttcgtggaatctgcaagtggatatttggctagctttgaggatttcgttggaaacgggattacatataaaaaggagacagcagcattctcagaaacttctttgtgatgtttgcattcaattcacagagttgagcattccctttcatagagcaggttggaaacactctttttgtagtatctggatgtggacatttggatcgctttcaggcctatggtgaaaaaggaaatatcttcccatgaaaactagacagaagcattctcagaaacttatttgtgatgtgtgccctcaactgacagtgttgaacctttgttttgatagagcagttctgaaacacactttttgtaaaatctgcaagaggatatttggatagctttgaggatttcgttggaaacgggaatgtcttcatgtaaactctagacagaagcattctcagaaactgctttgggatgtttcaattgaagtcccagtgttgaacattccctttcatagagcaggtttgaaacactctttttgtactatctggaagtggacatttggagcgctttcaggtctacggtgaaaaaggagatatcttccaataaaaactagatagaagcaatgtcagaacttttttcatgatgtatctactcagcaaacagagttgaacctttcttttgagagagcagttttgaaacactctttttgtggaatatgcaagtgggtattaggccagcttggaggatttcgttggaaacgggaatacgtataaaaagcagacagcagcattgtcagaaactactttgtgatgtttgcattcaagtcacagaattgaacactccctttcacagagcaggtttgaaacactctttttgtagtgtctgtaagtgaacatttggattgctttcaggcctaaggtgaaaaaggaaatatcttcccataaaaactagacagaagcattctcagaaacttgtttctgatgtgtgccctctactgacagagttgaacctttctttgcaaagagcagttttgaaacactctttttgtagaatctgcaagaggatatttggatagctttgaggatttcttgggaaacgggaatgtcttcagataaactctagacagaagcattctcagaaaacttctttgggatgtttcaattgaagtcacagtgttgaacattccctttcacagagcaggtttgaaacactctttttgtagtgtctataagtgaacatttggcgtgctttcaggcctaacgtgaaaaaggaaatatcttcccataaaaactagacagaagcattctcagaaacttgttcctgatgtgtgccctctactgacagagttgaacctttctttgcaaagagcagctttgaaacactctttttgtagaatctgcaagaggatatttggatagctttgaggatttcgttggaaacgggtatgtcttcagataaactctagacagaagcattctcagaaacttctttgggatgttgcattcaagtcacagagtagaacattcccattcatagagcagatttgaaacactctttttgtagtatctggaagtggacatttggagcgctttcaggcctatgttgaaaaaggaaatatcttcccataaaaactagacggaagcattctcagaaacttatttgtgatgtgtttgctcaactaacaggattgaaccatcgttttgaaggagcagttttgaaacactgttttcatggaatctgcaagtggatatttggctagctttgaggatttcgttggaaacgggattacatataaaaaggagacagcagcattctcagaaacttctttgtgatgtctgcattcaattcacagagttgagcattccctttcatagagcaggttggaaacactctttttgtagtatctggatgaggacatttggagcgctttcaggcgtatggtgaaaaaggaaatatcttcccgtaaaaactagacagaagcattctcagaaatttatttgtgatgtgtgccctcaactaacagagttgaacctttcttttgatagagcagttttgaaacactctttttgtaaaatctgcaagaggatatttggatagctttgaggatttcgttgcaaacgggaatggcttcatataaactctagacagaagcattctcagaaacttcgttgggatgtttcgattgaagtcccagtgttgaacattcccttttatagagcaggttggaaacactctttctgcattccctggaagtggacatttggagagctttcaggacgacggtgaaaatggaaatatcttccaagaaaatctagatagaagcaatgtcagaaacttttatgtgatggatctactcagctaacagagttgaacctttcttttgagacagcagttttgcaacactctttttgtggaatatgcaagtggatattagggcagctttgaggatttcgttggaaacgggaatacatgtaaaaagcagacagcagcattctcagaaacttctttgtgatgtttgcattgaagtcacagagttgaacattccctttgagagagcaggtttgaaacacgccttttgtcatatctggaagtgtccattcggagcgcattcaggcttgtgttgaaaaaggaaatatcctcccataaaaactagacagaagcattctcagaaacttatctgtgatgtatgtactcaactaacagaactaaaccatcgttttgaaggagcagttttgaaacactctttttgcggaatctgcaagtggatatttggctagctgggaggatttcgttggaaacgggattacatacaaaaagcagacagcagcattctcagaaacttctttgtgatgtttgcattcaagtcacagagttgaacattccctttcatagagcaggtttgaaacactctttttgtagtatctggatgtggacatttggatcgctttcaggcctatggtgaaaaaggaaatatcttcccatgaaaactagacagaagcattctcagaaacttatttgtgatgtgtgccctcaactgacagtgttgaacctttgttttgatagagcagttctgaaacacactttttgtaaaatctgcaagaggatatttggatagctttgaggatttcgttgcaaacgggaatgtcttcatgtaaactctggacagaagcattctcagaaactgctttgggatgtttcaattgaagtcccagtgttgaacattccctttcataggagcaggtttgaaacactctttttgtactatctggaagtggacatttggagcgctttcaggtctacggtgaaaaaggagatatcttccaataaaaactagatagaagcaatgtcagaacttttttcatgatgtatctactcagctaacagagttgaacctttcttttgagagagcagttttgaaacactctttttgtggaatatgcaagtgggtattaggccagcttggaggatttcgttggaaacgggaatacgtataaaaagcagacagcagcattgtcagaaactactttgtgatatttgcattcaagtcacagaattgaacactccctttcacagagcaggtttgaaacactctttttgtagtgtctgtaagtgaacatatggattgctttcaggcctaaggtgaaaaaggaaatatcttcccataaaaactagacagaagcattctcagaaacttgtttgtgatgtgtgccctctactgacagagttgaacctttctttgcaaagagcagttttgaaacactctttttgtagaatctgcaagaggatatttggatagctttgaagatttcttgggaaacgggaatgtcttcagataaactctagacagaagcattctcagaaacttctttgggatgtttcaattgaagtcacagtgttgaacattccctttcacagagcaggtttgaaacactctttttgtagtgtctataagtgaacatttggcgtgctttcaggcctaacgtgaaaaaggaaatatcttcccataaaaactagacagaagcattctcagaaacttgttcatgatgtgtgccctctactgacagagttgaacctttctttgcaaagagcagctttgaaacactctttttgtagaatctgcaagaggatatttggatagctttgaggatttcgttggaaacgggtatgtcttcagataaactctagacagaagcattctcagaaacttctttgggatgttgcattcaagtcacagagtagaacattcccattcatagagcagatttgaaacactctttttgtagtatctggaagtggacatttggagcgctttcaggcctatgttgaaaaaggaaatatcttcccataaaaactagacggaagcattctcagaaacttacttgtgatgtgtttgctcaactaacagaattgaaccatcgttttgaaggagcagttttgaaacactgttttcgtggaatctgcaagtggatatttggctagctttgaggatttcgttggaaacgggattacatataaaaaggagacagcagcattctcagaaacttctttgtgatgtctgcattcaagtcacagagttgagcattccctttcatagagcaggttggaaacactctttttgtagtatctggatgaggacatttggagcgctttcaggcctatggtgaaaaaggaaatatcttcccgtaaaaactagacagaagcattctcagaaatttatttgtgatgtgtgccctcaactaacagagttgaacctttcttttgatagagcagttttgaaacactctttttgtaaaatctgcaagaggatatttggatagctttgaggatttcgttgcaaacgggaatggcttcatataaactctagacagaagcattctcagaaacttcgttgggatgtttcgattgaagtcccagtgttgaacattcccttttatagagcaggttggaaacactctttctgcattccctggaagtggacatttggagcgctttcaggacgacggtgaaaatggaaatatcttccaagaaaatctagatagaagcaacgtcagaaacttttatgtgatggatctactcagctaacagagttgaacctttcttttgagagagcagttttgcaacactctttttgtggaatatgcaagtggatattagggcagctttgaggatttcgttggaaacgggaatacatgtaaaaagcagacagcagcattctcagaaacttctttgtgatgtttgcattgaagtcacagagttgaacattccctttgagagagcaggtttgaaacacgccttttgtcatatctggaagtgtccattcggagcgcattcaggcttgtgttgaaaaaggaaatatcctcccataaaaactagacagaagcattctcagaaacttatctgtgatgtatgtactcaactaacagaactaaaccatcgttttgaaggagcagttttgaaacactctttttgcggaatctgcaagtggatatttggctagctgggaggatttcgttggaaacgggattacatacaaaaagcagacagcagcattctcagaaacttctttgtgatgtttgcattcaagtcacagagttgaacattccctttcatagagcaggtttgaaacactctttttgtagtatctggatgtggacatttggatcgctttcaggcctatggtgaaaaaggaaatatcttcccatgaaaactagacagaagcattctcagaaacttatttgtgatgtgtgccctcaactgacagtgttgaacctttgttttgatagagcagttctgaaacacactttttgtaaaatctgcaagaggatatttggatagctttgaggatttcgttggaaacgggaatgtcttcatgtaaactctacacagaagcattctcagaaactgctttgggatgtttcaattgaagtcccagtgttgaacattcccattcatagagcaggtttgaaacactctttttgtaatatctggaagtggacatttggagcgctttcaggtctacggtgaaaaaggagatatcttccaataaaaactagatagaagcaatgtcagaacttttttcatgatgtatctactcagctaacagagttgaacctttcttttgagagagcagttttgaaacactctttttgtggaatatgcaagtgggtattaggccagcttggaggatttcgttggaaacgggaatacgtataaaaagcagacagcagcattgtcagaaactactttgtgatgtttgcattcaagtcacagaattgaacactccctttcacagagcaggtttgaaacactctttttgtagtgtctgtaagtgtacatttggattgctttcaggcctaaggtgaaaaaggaaatatcttcccataaaaactagacagaagcattctcagaaacttgttcgtgatgtgtgccctctactgacagagttgaacctttctttgcaaagagcagctttgaaacactctttttgtagaatctgaaagaggatatttggatagctttgaggatttcgttgcaaacgggaatggcttcatataaactctagacagaagcattctcagaaacttcgttgggatgtttcgattgaagtcccagtgttgaacattcccttttatagagcaggttggaaacactctttctgcattccctggaagtggacatttggagcgctttcaggacgacggtgaaaatggaaatatcttccaagaaaatctagatagaagcaacgtcagaaacttttatgtgatggatctactcagctaacagagttgaacctttcttttgagagagcagttttgcaacactctttttgtggaatatgcaagtggatattagggcagctttgaggatttcgttggaaacgggaatacatgtaaaaagcagacagcagcattctcagaaacttctttgtgatgtttgcattgaagtcacagagttgaacattccctttgagagagcaggtttgaaacacgccttttgtcatatctggaagtgtccattcggagcgcattcaggcttgtgttgaaaaaggaaatatcctcccagaaaaactagacagaagcattctcagaaacttatctgtgatgtatgtactcaactaacagaactaaaccatcgttttgaaggagcagttttgaaacactctttttgcggaatctgcaagtggatatttggctagctgggaggatttcgttggaaacgggattacatacaaaaagcagacagcagcattctcagaaacttctttgtgatgtttgcattcaagtcacagagttgaacattccctttcatagagcaggtttgaaacactctttttgtagtatctggatgtggacatttggatcgctttcaggcctatggtgtaaaaggaaatatcttcccatgaaaactagacagaagcattctcagaaacttatttgtgatgtgtgccctcaactgacagtgttgaacctttgttttgatagagcagttctgaaacacactttttgtaaaatctgcaagaggatatttggatagctttgaggatttcgttggaaacgggaatgtcttcatgtaaactctacatagaagcattctcagaaactgctttgggatgtttcaattgaagtcccagtgttgaacattcccattcatagagcaggtttgaaacactctttttgtactatctggaagtggacatttggagcgctttcaggtctacggtgaaaaaggagatatcttccaataaaaactagatagaagcaatgtcagaacttttttcatgatgtatctactcagcaaacagagttgaacctttcttttgagagagcagttttgaaacactctttttgtggaatatgcaagtgggtattaggccagcttggaggatttcgttggaaacgggaatacgtataaaaagcagacagcagcattgtcagaaactactttgtgatgtttgcattcaagtcacagaattgaacactccctttcacagagcaggtttgaaacactctttttgtagtgtctgtaagtgaacatatggattgctttcaggcctaaggtgaaaaaggaaatatcttcccataaaaactagacagaagcattctcagaaacttgtttgtgatgtgtgccctctactgacagagttgaacctttctttgcaaagagcagttttgaaacactctttttgtagaatctgcaagaggatatttggatagctttgaggatttcttgggaaacgggaatgtcttcagataaactctagacagaagcattctcagaaacttctttgggatgtttcaattgaagtcacagtgttgaacattccctttcacagagcaggtttgaaacactctttttgtagtgtctataagtgaacatttggcgtgctttcaggcctaacgtgaaaaaggaaatatcttcccataaaaactagacagaagcattctcagaaacttgttcttgatgtgtcccctctactgacagagttgaacctttctttgcaaagagcagctttgaaacactctttttgtagaatctgcaagaggatatttggatagcttggaggatttcgttggaaacgggtatgacttcagataaactctagacagaagcattctcagaaacttctttgggatgttgcattcaagtcacagagtagaacattcccattcatagagcagatttgaaacactctttttgtagtatctggaagtggacatttggagcgctttcaggcctatgttgaaaaaggaaatatcttcccataaaaactagacggaagcattctcagaaacttatttgtgatgtgtttgctcaactaacaggattgaaccatcgttttgaaggagcagttttgaaacactgttttcgtggaatctgcaagtggatatttggctagctttgaggatttcgttggaaacgggattacatataaaaaggagacagcagcattctcagaaacttctttgtgatgtctgcattcaattcacagagttgagcattccctttcatagagcaggttggaaacactctttttgtagtatctggatgaggacatttggagcgctttcaggcgtatggtgaaaaaggaaatatcttcccgtaaaaactagacagaagcattctcagaagtttatttgtgatgtgtgccctcaactaacagagttgaacctttcttttgatagagcagttttgaaacactctttttgtaaaatctgcaagaggatatttggatagctttgaggatttcgttgcaaacgggaatggcttcatataaactctagacagaagcattctcagaaacttcgttgggatgtttcgattgaagtcccagtgttgaacattcccttttatagagcaggttggaaacactctttctgcattccctggaagtggacatttggagcgctttcaggacgacggtgaaaatggaaatatcttccaagaaaatctagatagaagcaatgtcagaaacttttatgtgatggatctactcagctaacagagttgaagctttcttttgagagagcagttttgcaacactctttttgtggaatatgcaagtggatattagggcagctttgaggatttcgttggaaacgggaatacatgtaaaaagcagacagcagcattctcagaaacttctttgtgatgtttgcattgaagtcacagagttgaacattccctttgagagagcaggtttgaaacacgccttttgtcatatctggaagtgtccattcggagcgcattcaggcttgtgttgaaaaaggaaatatcctcccataaaaactagacagaagcattctcagaaacttatctgtgatgtatgtactcaactaacagaactaaaccatcgttttgaaggagcagttttgaaacactctttttgcggaatctgcaagtggatatttggctagctgggaggatttcgttggaaacgggattacatacaaaaagcagacagcagcattctcagaaacttctttgtgatgtttgcattcaagtcacagagttgaacattccctttcatagagcaggtttgaaacactctttttgtagtatctggatgtggacatttggatcgctttcaggcctatggtgaaaaaggaaatatcttcccatgaaaactagacagaagcattctcagaaacttatttgtgatgtgtgccctcaactgacagtgttgaacctttgttttgatagagcagttctgaaacacactttttgtaaaatctgcaagaggatatttggatagctttgaggatttcgttggaaacgggaatgtcttcatgtaaactctagacagaagcattctcagaaactgctttgggatgtttcaattgaagtcccagtgttgaacattccctttcatagagcaggtttgaaacactctttttgtactatctggaagtggacatttagagcgctttcaggtctacggtgaaaaaggagatatcttccaataaaaactagatagaaagcaatgtcagaacttttttcatgatgtatctactcagctaacagagttgaacctttcttttgagagagcagttttgaaacactctttgtgtggaatatgcaagtgggtattaggccagcttggaggatttcgttggaaacgggaatacgtataaaaagcagacagcagcattgtcagaaactactttgtgatgtttgcattcaagtcacagaattgaacactccctttcacagagcaggtttgaaacactctttttgtagtgtctgtaagtgaacatatggattgctttcaggcctaaggtgaaaaaggaaatatcttcccataaaaactagacagaagcattctcagaaacttgtttgtgatgtgtgccctctactgacagagttgaacctttctttgcaaagagcagttttgaaacactctttttgtagaatctgcaagaggatatttggatagctttgaggatttcttgggaaacgggaatgtcttcagataaactctagacagaagcattctcagaaacttctttgggatgtttcaattgaagtcacagtgttgaacattccctttcacagagcaagtttgaaacactctttttgtagtgtctataagtgaacatttggcgtgctttcaggcctaacgtgaaaaaggaaatatcttcccataaaaactagacagaagcattctcagaaacttgttcgtgatgtgtgccctctactgacagagttgaacctttctttgcaaagagcagctttgaaacacactttttgtagaatctgcaagaggatatttggatagctttgaggatttcgttggaaacgggtatgtcttcagataaactctagacagaagcattctcagaaacttctttgggatgttgcattcaagtcacagagtagaacattcccattcatagagcagatttgaaacactctttttgtagtatctggaagtggacatttggagcgctttcaggcctatgttgaaaaaggaaatatcttcccataaaaactagacggaagcattctcagaaacttatttgtgatgtgtttgctcaactaacaggattgaaccatcgttttgaaggagcagttttgaaacactgttttcgtggaatctgcaagtggatatttggctagctttgaggatttcgttggaaacgggattacatataaaaaggagacagcagcattctcagaaacttctttgtgatgtctgcattcaattcacagagttgagcattccctttcatagagcaggttggaaacactctttttgtagtatctggatgaggacatttggagcgctttcaggcctatggtgaaaaaggaaatatcttcccgtaaaaactagacagaagcattctcagaaatttatttgtgatgtgtgccctcaactaacagagttgaacctttcttttgatagagcagttttgaaacactctttttgtaaaatctgcaagaggatatttggatagctttgaggatttcgttgcaaacgggaatggcttcatataaactctagacagaagcattctcagaaacttcgttgggatgtttcgattgaagtcccagtgttgaacattcccttttatagagcaggttggaaacactctttctgcattccctggaagtggacatttggagcgctttcaggacgacggtgaaaatggaaatatcttccaagaaattctagatagaagcaacgtcagaaacttttatgtgatggatctactcagctaacagagttgaacctttcttttgagagagcagttttgcaacactctttttgtggaatatgaaagtggatattagggcagctttgaggatttcgttggaaacgggaatacatgtaaaaagcagacagcagcattctcagaaacttctttgtgatgtttgcattgaagtcacagagttgaacattccctttgagagagcaggtttgaaacacgccttttgtcatatctggaagtgtccattcggagcgcattcaggcttgtgttgaaaaaggaaatatcctcccataaaaactagacagaagcattctcagaaacttatctctgatgtatgtactcaactaacagaactaaaccatcgttttgaaggagcagttttgaaacactctttttgcggaatctgcaagtggatatttggctagctgggaggatttcgttggaaacgggattacatacaaaaagcagacagcagcattctcagaaacttatttgtgatgtgtgccctcaactgacagtgttgaacctttgttttgatagagcagttctgaaacacactttttgtaaaatctgcaagaggatatttggatagctttgaggatttcgttggaaacgggaatgtcttcatgtaaactctagacagaagcattctcagaaactgctttgggatgtttcaattgaagtcccagtgttgaacattccctttcatagagcaggtttgaaacactctttttgtactatctggaagtggacatttggagcgctttcaggtctacggtgaaaaaggagatatcttccaataaaaactagatagaagcaatgtcagaacttttttcatgatgtatctactcagcaaacagagttgaacctttcttttgagagagcagttttgaaacactctttttgtggaatatgcaagtgggtattaggccagcttggaggatttcgttggaaacgggaatacgtataaaaagcagacagcagcattgtcagaaactactttgtgatgtttgcattcaagtcacagaattgaacactccctttcacagagcaggtttgaaacactctttttgtagtgtctgtaagtgaacatttggattgctttcaggcctaaggtgaaaaaggaaatatcttcccataaaaactagacagaagcattctcagaaacttgtttgtgatgtgtgccctctactgacagagttgaaactttctttgcaaagagctgttttgaaacactctttttgtagaatctgcaagaggatatttggatagctttgaggatttcttgggaaacgggaatgtcttcagataaactctagacagaagcattctcagaaacttctttgggatgtttcaattgaagtcagtgttgaacattccctttcacagagcaggtttgaaacactctttttgtagtgtctataagtgaacatttggcgtgctttcaggcgtaacgtgaaaaaggaaatatcttcccataaaaactagacagaagcattctcagaaacttgttcgtgatgtgtgccctctactgacagagttgaacctttctttgcaaagagcagctttgaaacactctttttgtagaatctgcaagaggatatttggatagctttgaggatttcgttggaaacgggtatgtcttcagataaactctagacagaagcattctcagaaacttctttgggatgttgcattcaagtcacagagtagaacattcccattcatagagcagatttgaaacactctttttgtagtatctggaagtggacatttggagcgctttcaggcctatgttgaaaaaggaaatatcttcccataaaaactagacggaagcattctcagaaacttatttgtgatgtgtttgctcaactaacaggattgaaccatcgttttgaaggagcagttttgaaacactgttttcgtggaatctgcaagtggatatttggctagctttgaggatttcgttggaaacgggattacatataaaaaggagacagcagcattctcagaaacttctttgtgatgtctgcattcaattcacagagttgagcattccctttcatagagcaggttggaaacactctttttgtagtatctggatgaggacatttggagcgctttcaggcgtatggtgaaaaaggaaatatcttcccgtaaaaactagacagaagcattctcagaagtttatttgtgatgtgtgccctcaactaacagagttgaacctttcttttgatagagcagttttgaaacactctttttgtaaaatctgcaagaggatatttggatagctttgaggatttcgttgcaaacgggaatggcttcatataaactctagacagaagcattctcagaaacttcgttgggatgtttcgattgaagtcccagtgttgaacattcccttttatagagcaggttggaaacactctttctgcattccctggaagtggacatttggagcgctttcaggacgacggtgaaaatggaaatatcttccaagaaaatctagatagaagcaatgtcagaaacttttatgtgatggatctactcagctaacagagttgaacctttcttttgagagagcagttttgcaacactctttttgtggaatatgcaagtggatattagggcagctttgaggatttcgttggaaacgggaatacatgtaaaaagcagacagcagcattctcagaaacttctttgtgatgtttgcattgaagtcacagagttgaacattccctttgagagagcaggattgaaacacgccttttgtcatatctggaagtgtccattcggagcgcattcaggcttgtgttgaaaaaggaaatatcctcccataaaaagtatacagaagcattctcagaaacttatttgtgatgtatgtactcaactaacagaactaaaccatcgttttgacggagcagttttgaaacactctttttgcggaatctgcaagtggatatttggctagctgggaggatttcgttggaaacgggattacatacaaaaagcagagagcagcattctcagaaacttctttgtgatgtttgcattcaagtcacagagttgaacattccctttcatagagcaggtttgaaacactctttttgtagtatctggatgtggacatttggatcgctttcaggcctatggtgaaaaaggaaatatcttcccatgaaaactagacagaagcattctcagaaacttatttgtgatgtgtgccctcaactgacagtgttgaacctttgttttgatagagcagttctgaaacacactttttgtaaaatctgcaagaggatatttggatagctttgaggatttcgttggaaacgggaatgtcttcatgtaaactctagacagaagcattctcagaaactgctttgggatgtttcaattgaagtcccagtgttgaacattcccattcatagagcaggtttgaaacactctttttgtactatctggaagtggacatttggagcgctttcaggtctacggtgaaaaaggagatatcttccaataaaaactagatagaagcaatgtcagaacttttttcatgatgtatctactcagcaaacagagttgaacctttcttttgagagagcagttttgaaacactctttttgtggaatatgcaagtgggtattaggccagcttggaggatttcgttggaaacgggaatacgtataaaaagcagacagcagcattgtcagaaactactttgtgatgtttgcattcaagtcacagaattgaacactccctttcacagagcaggtttgaaacactctttttgtagtgtctgtaagtgaacatatggattgctttcaggcctaaggtgaaaaaggaaatatcttcccataaaaactagacagaagcattctcagaaacttctttgggatgtttcaattgaagtcacagtgttgaagattccctttcacagagcaggtttgaaacactctttttgtagtgtctataagtgaacatttggcgtgctttcaggcctaacgtgaaaaaggaaatatcttcccgtaacaactagacagaagcattctcagaaacttgttcatgatgtgtgccctctactgacagagttgaacctttctttgcaaagagcagctttgaaacactctttttgtagaatctgcaagaggatatttggatagctttgaggatttcgttggaaacgggtatgtcttcagataaactctagacagaagcattctcagaaacttctttgggatgttgcattcaagtcacagagtagaacattcccattcatagagcagatttgaaacactctttttgtagtatctggaagtggacatttggagcgctttcaggcctatgttgaaaaaggaaatatcttcccataaaaactagacggaagcattctcagaaacttacttgtgatgtgtttgctcaactaacagaattgaaccatcgttttgaaggagcagttttgaaacactgttttcgtggaatctgcaagtggatatttggctagctttgaggatttcgttggaaacgggattacatatacaaaggagacagcagcattctcagaaacttctttgtgatgtctgcattcaagtcacagagttgagcattccctttcatagagcaggttggaaacactctttttgtagtatctggatgaggacatttggagcgctttcaggcgtatggtgaaaaaggaaatatcttcccgtaaaaactagacagaagcattctcagaagtttatttgtgatgtgtgccctcaactaacagagttgaaactttcttttgatagagcagttttgaaacactcattttgtaaaatctgcaagaggatatttggatagctttgaggatttcgttgcaaacgggaatggcttcatataaactctagacagaagcattctcagaaacttcgttgggatgtttcgattgaagtcccagtgttgaacattcccttttatagagcaggttggaaacactctttctgcattccctggaagtggacaattggagcgctttcaggacgacggtgaaaatggaaatatcttccaataaaatctggatagaagcaatgtcagaaactattctgtgatggatctactcagctaacagagttgaacctttcttttgagagagcagttttgcaacactctttttgtggaatatgcaagtggatattagggcagctttgaggatttcgttggaaacgggaatacatgtaaaaagcagacagcagcattctcagaaacttctttgtgatgtttgcattgaagtcacagagttgaacattccctttgagagagcaggtttgaaacacgccttttgtcatatctggaagtgtccattcggagcgcattcaggcttgtgttgaaaaaggaaatatcctcccataaaaactagacagaagcattctcagaaacttatctgtgatgtatgtactcaactaaccgaactaaaccatcgttttgaaggagcagttttgaaacactctttttgcggaatctgcaagtggatatttggctagctgggaggatttcgttagaaacgggattacatacaaaaagcagacagcagcattttcagaaactactttgtgatgtttgcattcaagtcacagagttgaacattccctttcatagagcaggtttgaaacactctttttgtagtatctggatgtggacatttggatcgctttcaggcctatggtgaaaaaggaaatatcttcccatgaaaactagacagaagcattctcagaaacttatttgtgatgtgtgtactcaactaacagaattgaaccatcgttttgaaagagcagttttgaaacactccttttgtggaatctgcaagtggatatttgtctagctttgaggatttcgttggaaacgggattacatataaaaagcagacagcagcattctcagaaacttctttgtgatgtttgcattcaagtcacagagttgaacattccctttcatagagcaggtttgaaacactctttttgtagtatctggatgtggacatttggatcgctttcaggcctatggtgaaaaaggaaatatcttcccatgaaaactagacagaagcattctcagaaacttatttgtgatgtgtgccctcaactgacagtgttgaacctttgttttgatagagcagttctgaaacacactttttgtaaaatctgcaagaggatatttgcatagctttgaggatttcgttggaaacgggaatgtcttcatgtaaactctagacagaagcattctcagaaactgctttgggatgtttcaattgaagtcccagtgttgaacattccctttcatagagcaggtttgaaacactctttttgtactatctggaagtggacatttggagcgctttcaggtctacggtgaaaaaggagatatcttccaataaaaactagatagaagcaatgtcagaacttttttcattatgtatctactcagcaaacagagttgaagctttcttttgagagagcagttttgaaacactctttttgtggaatatgcaagtgggtattaggccaccttggaggatttcgttggaaacgggaatacgtataaaaagcagacagcagcattgtcagaaactactttgtgatgtttgcattcaagtcacagaattgaacactccctttcacagagcaggtttgaaacactctttttgtagtgtctgtaagtgaacatttggattgctttcaggcctaaggtgaaaaaggaaatatcttcccataaaaaccagacagaagcattctcagaaacttgtttgtgatgtgtgccctctactgacagagttgaacctttctttgcaaagagcagttttgaaacactctttttgtagaatctgcaagaggatatttggatagctttgaggatttcttgggaaacgggaatgtcttcagataaactctagacagaagcattctcagaaacttctttgggatgtttcaattgaagtcacagtgttgaacattccctttcacagagcaggtttgaaacactctttttgtagtgtctataagtgaacatttggcgtgctttcaggcgtaacgtgaaaaaggaaatatcttcccataaaaactagacagaagcattctcagaaacttgttcttgatgtgtcccctctactgacagagttgaacctttctttgcaaagagcagctttgaaacactctttttgtagaatctgcaagaggatatttggatagctttgaggatttcgttggaaacgggtatgtcttcagataaactctagacagaagcattctcagaaacttctttgggatgttgcattcaagtcacagagtagaacattcccattcatagagcagatttgaaacactctttttgtagtatctggaagtggacatttggagcgctttcaggcctatgttgaaaaaggaaatatcttcccataaaaactagacggaagcattctcagaaacttatttgtgatgtgtttgctcaactaacaggattgaaccatcgttttgaaggagcagttttgaaacactgttttcgtggaatctgcaagtggatatttggctagctttgaggatttcgttggaaacgggattacatatacaaaggagacagcagcattctcagaaacttctttgtgatgtctgcattcaattcacagagttgagcattccctttcatagagcaggtttgaaacactctttttgtagtatctggatgaggacatttggagcgctttcaggcgtatggtgaaaaaggaaatatcttcccgtaaaaactagacagaagcattctcagaaatttatttgtgatgtgttccctcaactaacagagttgaacctttcttttgatagagcagttttgaaacactctttttgtaaaatctgcaagaggatatttggatagctttgaggatttcgttgcaaacgggaatggcttcatataaactctagacagaagcattctcagaaacttcgttgggatgtttcgattgaagtcccagtgttgaacattcccttttatagagcaggttggaaacactctttctgcattccctggaagtggacatttggagcgctttcaggacgacggtgaaaatggaaatatcttccaagaaaatctagatagaagcaatgtcagaaacttttatgtgatggatctactcagctaacagagttgaagctttcttttgagagagcagttttgcaacactctttttgtggaatatgcaagtggatattagggcagctttgaggatttcgttggaaacgggaatacatgtaaaaagcagacagcagcattctcagaaacttctttgtgatgtttgcattgaagtcacagagttgaacattccctttgagagagcaggtttgaaacacgccttttgtcatatctggaagtgtccattcggagcgcattcaggcttgtgttgaaaaaggaaatatcctcccataaaaactagacagaagcattctcagaaacttatctgtgatgtatgtactcaactaacagaactaaaccatcgttttgaaggagcagttttgaaacactctttttgcggaatctgcaagtggatatttggctagctgggaggatttcgttggaaacgggattacatacaaaaagcagagagcagcattctcagaaacttctttgtgatgtttgcattcaagtcacagagttgaacattccctttcatagagcaggtttgaaacactctttttgtagtatctggatgtggacatttggatcgctttcaggcctatggtgaaaaaggaaatatcttcccatgaaaactagacagaagcattctcagaaacttatttgtgatgtgtgccctcaactgacagtgttgaacctttgttttgatagagcagttttgaaacacactttttgtaaaatctgcaagaggatatttggatagctttgaggatttcgttggaaacgggaatgtcttcatgtaaactctagacagaagcattctcagaaactgctttgggatgtttcaattgaagtcccagtgttgaacattccctttcatagagcaggtttgaaacactctttttgtactatctggaagtggacatttggagcgctttcaggtctacggtgaaaaaggagatatcttccaataaaaactagatagaagcaatgtcagaacttttttcatgatgtatctactcagcaaacagagttgaacctttcttttgagagagcagttttgaaacactctttttgtggaatatgcaagtgggtattaggccagcttggaggatttcgttggaaacgggaatacgtataaaaagcagacagcagcattgtcagaaactactttgtgatgtttgcattcaagtcacagaattgaacactccctttcacagagcaggtttgaaacactctttttgtagtgtctgtaagtgaacatttggattgcttcaggcctaaggtgaaaaaggaaatatcttcccataaaaactagacagaagcattctcagcaaacttgtttgtgatgtgtgccctctactgacagagttgaaactttctttgcaaagagcagttttgaaacactctttttgtagaatctgcaagaggatatttggatagctttgaggatttcttgggaaacgggaatgtcttcagataaactctagacagaagcattctcagaaacttctttgggatgtttcaattgaagtcacagtgttgaacattccctttcacagagcaggtttgaaacactctttttgtagtgtctataattgaacatttggcgtgctttcaggcctaacgtgaaaaaggaaatatcttcccataaaaactagacagaagcattctcagtaaacttgtttgtgatgtgtgccctctactgacagagttgaacctttctttgcaaagagcagctttgaaacactctttttgtagaatctgcaagaggatatgtggatagctttgaggatttcgttggaaacgggtatgtcttcagataaactctagacagaagcattctcagaaacttctttgggatgtttcaattgaagtcacagtgttgaacattccctttcacagagcaggtttgaaacactctttttgtagtgtctataagtgaacatttggcgtgctttcaggcctaacgtgaaaaaggaaatatcttcccataaaaactagacagaagcattctcagaaacttgttcgtgatgtgtgccctctactgacagagttgaacctttctttgcaaagagcagctttgaaacactctttctgtagaatctacaagaggatatttggatagcttggaggatttccttggaaacgggtatgtcttcagataaactctagacagaagcattctcagaaacttctttgggatgttgcattcaagtcacagagtagaacattcccattcatagagcagatttgaaacactctttttgtagtatctggaagtggacatttggagcgctttcaggcctatgttgaaaaaggaaatatcttcccataaaaactagacggaagcattctcagaaacttatttgtgatgtgtttgctcaactaacaggattgaaccatcgttttgaaggagcagttttgaaacactgttttcgtggaatctgcaagtggatatttggctagctttgaggatttcgttggaaatgggattacatatacaaaggagacagcagcattctcagaaactactttgtgatgtctgcattcaattcacagagttgagcattccctttcatagagcaggttggaaacactctttttgtagtatctggatgaggacatttggagcgctttctggcctatggtgaaaaaggaaatatcttcctgtaaaaactagacagaagcattctcagaagtttatttgtgatgtgtgccctcaactaacagagttgaacctttcttttgatagagcagttttgaaacactctttttgtaaaatctgcaagaggatatttggatagctttgaggatttcgttgcaaacgggaatggcttcatataaactctagacagaagcattctcagaaacttcgttgggatgtttcgattgaagtcccagtgttgaacattcccttttatagagcaggttggaaacactctttctgcattccctggaagtggacatttggagcgctttcaggacgacggtgaaaatggaaatatcttccaagaaaatctagatagaagcaacgtcagaaacttttctgtgatggatctactcagctaacagagttgaacctttcttttgagagagcagttttgcaacactctttttgtggaatatgcaagtggatattagggcagctttgaggatttcgttggaaacgggaatacatgtaaaaagcagacagcagcattctcagaaacttctttgtgatgtttgcattgaagtcacagagttgaacattccctttgagagagcaggtttgaaacacgccttttgtcatatctggaagtgtccattcggagcgcattcaggcttgtgttgaaaaaggaaatatcctcccagaaaaactagacagaagcattctcagaaacttatctgtgatgtatgtactcaactaacagaactaaaccatcgttttgaaggagtagttttgaaaaactctttttgcggaatctgcaagtggatatttggctagctgggaggatttcgttggaaacgggattacatacaaaaagcagacagcagcattctcagaaacttctttgtgatgtttgcattcaagtcacagagttgaacattccctttcatagagcaggtttgaaacactctttttgtagtatctggatgtggacatttggatcgctttcaggcgtatggtgaaaaaggaaatatcttcccatgaaaactagacagaagcattctcagaaatttatttgtgatgtgtgccctcaactaacagagttgaacctttcttttgatagagcagttttgaaacactctttttgtaaaatctgcaagaggatatttggatagctttgaggatttcgttgcaaacgggaatggcttcatataaactctagacagaagcattctcagaaacttcgttgggatgtttcgattgaagtcccagtgttgaacattcccttttatagagcaggttggaaacactctttctgcattccctggaagtggacatttggagcgctttcaggacgacggtgaaaatggaaatatcttccaagaaaatctagatagaagcaacgtcagaaacttttatgtgatggatctactcagctaacagagttgaacctttcttttgagagagcagttttgcaacactctttttgtggaatatgcaagtggatattagggcagctttgaggatttcgttggaaacgggaatacatgtaaaaagcagacagcagcattctcagaaacttctttgtgatgtttgcattgaagtcacagagttgaacattccctttgagagagcaggtttgaaacacgccttttgtcatatctggaagtgtccattcggagcgcattcaggcttgtgttgaaaaaggaaatatcctcccataaaaactagacagaagcattctcagaaacttatctgtgatgtatgtactcaactaacagaactaaaccatcgttttgaaggagcagttttgaaacactctttttgcggaatctgcaagtggatatttggctagctgggaggatttcgttggaaacgggattacatacaaaaagcagacagcagcattctcagaaacttctttgtgatgtttgcattcaagtcacagagttgaacattccctttcatagagcaggtttgaaacactctttttgtagtatctggatgtggacatttggatcgctttcaggcctatggtgaaaaaggaaatatcttcccatgaaaactagacagaagcattctcagaaacttatttgtgatgtgtgccctcaactgacagtgttgaacctttgttttgatagagcagttctgaaacacactttttgtaaaatctgcaagaggatatttggatagctttgaggatttcgttggaaacgggaatgtcttcatgtaaactctagacagaagcattctcagaaactgctttgggatgtttcaattgaagtcccagtgttgaacattcccattcatagagcaggtttgaaacactctttttgtactatctggaagtggacatttggagcgctttcaggtctacggtgaaaaaggagatatcttccaataaaaactagatagaagcaatgtcagaagtttttcatgatgtatctactcagcaaacagagttgaacctttcttttgagagagcagttttgaaacactctttttgtggaatatgcaagtgggtattaggccagcttggaggatttcgttggaaacgggaatacgtattaaaagcagacagcagcattgtcagaaactactttgtgatgtttgcattcaagtcacagaattgaacactccctttcacagagcaggtttgaaacactctttttgtagtgtctgtaagtgaacatatggattgctttcaggcctaaggtgaaaaaggaaatatcttcccataaaaactagacagaagcattctcagaaacttgtttgtgatgtgtgccctctactgacagagttgaacctttctttgcaaagagcagttttgaaacactctttttgtagaatctgcaagaggatatttggatagctttgaagatttcttgggaaacgggaatgtcttcagaaaaactctagacagaagcattctcagaaacttctttgggatgtttcaattgaagtcacagtgttgaacattccctttcacagagcaggtttgaaacactctttttgtagtgtctataagtgaacatttggcgtgctttcaggcctaacgtgaaaaaggaaatatcttcccataaaaactagacagaagcattctcagaaacttgttcatgatgtgtgccctctactgacagagttgaacctttctttgcaaagagcagctttgaaacactctttttgtagaatctgcaagaggatatttggatagctttgaggatttcgttggaaacgggtatgtcttcagataaactctagacagaagcattctcagaaacttctttgggatgttgcattcaagtcacagagtagaacattcccattcatagagcagatttgaaacactctttttgtagtatctggaagtggacatttggagcactttcaggcctatgttgaaaaaggaaatatcttcccataaaaactagacggaagcattctcagaaacttatttctgatgtgtttgctcaactaacagaatagaaccatcgttttgaaggagcagttttgaaacactgttttcgtggaatctgcaagtggatatttggctagctttgaggatttcgttggaaacgggattacctataaaaaggagacagcagcattctgagaaacttctttgtgatgtctgcattcaattcacagagttgagcattccctttcatagagcaggttggaaacactctttttgtagtatctggatgtggacatttggttcgctttcaggcctatggtgaaaaaggaaatatcttcccatgaaaactagacagaagcattctcagaaatttatttgtgatgtgtgccctcaactaacagagttgaacctttcttttgatagagcagttttgaaacactctttttgtaaaatctgcaagaggatatttggatagctttgaggatttcgttgcaaacgggaatggcttcatataaactctagacagaagcattctcagaaacttcgttgggatgtttcgattgaagtcccagtgttgaacattcccttttatagagcaggttggaaacactctttctgcattccctggaagtggacatttggagcgctttcaggacgacggtgaaaatggaaatatcttccaataaaatctagatagaagcaatgtcagaaacttttctgtgatggatctactcagctaacagagttgaacctttcttttgagagagcagttttgcaacactctttttgtggaatatgcaagtggatattagggcagctttgaggatttcgttggaaacgggaatacatgtaaaaagcagacagcagcattctcagaaacttctttgtgatgtttgcattgaagtcacagagttgaacattccctttgagagagcaggtttgaaacacgccttttgtcatatctggaagtgtccattcggagcgcattcaggcttgtgttgaaaaaggaaatatcctcccataaaaactagacagaagcattctcagaaacttatctgtgatgtatgtactcaactaacagaactaaaccatcgttttgaaggagcagttttgaaacactctttttgcggaatctgcaagtggatatttggctagctgggaggatttcgttggaaacgggattacatacaaaaagcagacagcagcattctcagaaacttctttgtgatgtttgcattcaagtcacagagttgaacattccctttcatagagcaggtttgaaacactctttttgtagtatctggatgtggacatttggatcgctttcaggcctatggtgaaaaaggaaatatcttcccatgaaaactagacagaagcattctcagaaacttatttgtgatgtgtgccctcaactgacagtgttgaacctttgttttgatagagcagttctgaaacacactttttgtaaaatctgcaagaggatatttggatagctttgaggatttcgttggaaacgggaatgtcttcatgtaaactctagacagaagcattctcagaaactgctttgggatgtttcaattgaagtcccagtgttgaacattccctttcatagagcaggtttgaaacactctttttgtactatctggaagtggacatttggagcgctttcaggtctacggtgaaaaaggagatatcttccaataaaaactagatagaagcaatgtcagaacttttttcatgatgtatctactcagcaaacagagttgaacctttcttttgagagagcagttttgaaacactctttttgtggaatatgcaagtgggtattaggccagcttggaggatttcgttggaaacgggaatacgtataaaaagcagacagcagcattgtcagaaactactttgtgatgtttgcattcaagtcacagaattgaacactccctttcacagagcaggtttgaaacactctttttgtagtgtctgtaagtgaacatttggattgctttcaggcctaaggtgaaaaaggaaatatcttcccataaaaactagacagaagcattctcagaaacttgtttgtgatgtgtgccctctactgacagagttgaacctttctttgcaaagagcagttttgaaacactctttttgtagaatctgcaagaggatatttggatagctttgaggatttcttgggaaacgggaatgtcttcagataaactctagacagaagcattctcagaaacttctttgggatgtttcaattgaagtcacagtgttgaacattccctttcacagagcaggtttgaaacactctttttgtagtgtctataagtgaacatttggcgtgctttcaggcgtaacgtgaaaaaggaaatatcttcccataaaaaccagacagaagcattctcagaaacttgttcatgatgtgtgccctctactgacagagttgaacctttctttgcaaagagcatctttgaaacactctttttgtagaatctgcaagaggatatttggatagctttgaggatttcgttggaaacgggtatgtcttcagataaactctagacagaagcattctcagaaacttctttgggatgttgcattcaagtcacagagtagaacattcccattcatagagcagatttgaaacactctttttgtagtatctggaagtggacatttggagcgctttcaggcctatgttgaaaaaggaaatatcttcccataaaaactagacggaagcattctcagaaacttacttgtgatgtgtttgctcaactaacagaattgaaccatcgttttgaaggagcagttttgaaacactgttttcgtggaatctgcaagtggatatttggctagctttgaggatttcgttggaaacgggattacatataaaaaggagacagcaagcattctcagaaacttctttgtgatgtctaaattcaagtcacagagttgagcattccctttcatagagcaggttggaaacactctttttgtagtatctggatgaggacatttggagcgctttcaggcctatggtgaaaaaggaaatatcttcccgtaaaaactagacagaagcattctcagaaatttatttgtgatgtgtgccctcaactaacagagttgaacctttcttttgatagagcagttttgaaacactctttttgtaaaatctgcaagaggatatttggatagctttgaggatttcgttgcaaacgggaatggcttcatataaactctagacagaagcattctcagaaacctcgttgggatgtttcgattgaagtcccagtgttgaacattcccttttatagagcaggttggaaacactctttctgcattccctggaagtggacatttggagcggtttcaggacgacggtgaaaatggaaatatcttccaagaaaatctagatagaagcaacgtcagaaacttttctgtgatggatctactcagctaacagagttgaacctttcttttgagagagcagttttgcaacactctttttgtggaatatgcaagtggatattagggcagctttgaggatttcgttggaaacgggaatacatgtaaaaagcagacagcagcattctcagaaacttctttgtgatgtttgcattgaagtcacagagttgaacattccctttgagagagcaggtttgaaacacgccttttgtcatatctggaagtgtccattcggagcacattcaggcttgtgttgaaaaaggaaatatcctcccataaaaactagacagaagcattctcagaaacttatctgtgatgtatgtattcaactaacagaactaaaccatcgttttgaaggagcagttttgaaacactctttttgcggaatctgcaagtggatatttggctagctgggaggatttcgttggaaacgggattacatacaaaaagcagacagcagcattctcagaaacttctttgtgatgtttgcattcaagtcacagagttgaacattccctttcatagagcaggtttgaaacactctttttgtagtatctggatgtggacatttggatcgctttcaggcctatggtgaaaaaggaaatatcttcccatgaaaactagacagaagcattctcagaaacttatttgtgatgtgtgccctcaactgacagtgttgaacctttgttttgatagagcagttctgaaacacactttttgtaaaatctgcaagaggatattgggatagctttgaggatttcgttggaaacgggaatgtcttcatgtaaactctagacagaagcattctcagcaaactgctttgggatgtttcaattgaagtcccagtgttgaacattccctttcatagagcaggtttgaaacactctttttgtactatctggaagtggacatttggagcgctttcaggtctacggtgaaaaaggagatatcttccaataacaactagatagaagcaatgtcagaacttttttcatgatgtatctactcagcaaacagagttgaacctttcttttgagagagcagttttgaaacactctttttgtggaatatgcaagtgggtattaggccagcttggaggatttcgttggaaacgggaatacgtataaaaagcagacagcagcattgtcagaaactactttgtgatgtttgcattcaagtcacagaattgaacactcgctttcacagagcaggtttgaaacactctttttgtagtgtctgtaagtgaacatttggattgctttcaggcctaaggtgaaaaaggaaatatcttcccataaaaactagacagaagcattctcagaaacttgtttgtgatgtgtgccctctactgacagagttgaacctttctttgcaaagagcagttttgaaacactctttttgtagaatctgcaagaggatatttggatagctttgaggatttcttgggaaacgggaatgtcttcagataaactctagacagaagcattctcagaaacttctttgggatgtttcaattgaagtcacagtgttgaacattccctttcacagagcaggtttgaaacactctttttgtagtgtctataagtgaacatttggcgtgctttcaggcgtaacgtgaaaaaggaaatatcttcccataaaaactagacagaagcattctcagaaacttgttcgtgatgtgtgccctctactgacagagttgaacctttctttgcaaagagcagctttgaaacacactttttgtagaatctgcaagaggatatttggatagctttgaggatttcgttggaaacgggtatgtcttcagataaactctagacagaagcattctcagaaacttctttgggatgttgcattcaagtcacagagtagaacattcccattcatagagcagatttgaaacactctttttgtagtatctggaagtggacatttggagcgctttcaggcctatgttgaaaaaggaaatatcttcccataaaaactagacggaagcattctcagaaacttatttgtgatgtgtttgctcaactaacaggattgaaccatcgttttgaaggagcagttttgaaacactgttttcgtggaatctgcaagtggatatttggctagctttgaggatttcgttggaaacgggattacatataaaaaggagacagcagcattctcagaaacttctttgtgatgtctgcattccagtcacagagttgagcattccctttcatagagcaggttggaaacactctttttgtagtatctggatgaggacatttggagcgctttcaggcctatggtgaaaaaggaaatatcttcccgtaaaaactagacagaagcattctcagaaatttatttgtgatgtgtgccctcaactaacagagttgaacctttcttttgatagagcagttttgaaacactctttttgtaaaatctgcaagaggatatttggatagctttgaggatttcgttgcaaacgggaatggcttcatataaactctagacagaaagcattctcagaaacttcgtcgggatgtttcgattgaagtcccagtgttgaacattcccttttatagagcaggttggaaacactctttctgcattccctggaagtggacaattggagcgctttcaggacgacggtgaaaatggaaatatcttccaataaaatctggatagagcaacgtcagaaacttttctgtgatggatctactcagctaacagagttgaacctttcttttgagagagcagttttgcaacactctttttgtggaatatgcaagtggatattagggcagctttgaggatttcgttggaaacgggaatacatgtaaaaagcagacagcagcattctcagaaacttctttgtgatgtttgcattgaagtcacagagttgaacattccctttgagagagcaggtttgaaacacgccttttgtcatatctggaagtgtccattcggagcgcattcaggcttgtgttgaaaaaggaaatatcctcccataaaaactagacagaagcattctcagaaacttatctgtgatgtatgtactcaactaacagaactaaaccatcgttttgaaggagcagttttgaaacactctttttgcggaatctgcaagtggatatttggctagctgggaggatttcgttggaaacgggattacatacaaaaagcagacagcagcattctcagaaacttctttgtgatgtttgcattcaagtcacagagttgaacattccctttcatagagcaggtttgaaacactctttttgtagtatctggatgtggacatttggatcgctttcaggcctatggtgaaaaaggaaatatcttcccatgaaaactagacagaagcattctcagaaacttatttgtgatgtgtgccctcaactgacagtgttgaacctttgttttgatagagcagttctgaaacacactttttgtaaaatctgcaagaggatatttggatagctttgaggatttcgttggaaacgggaatgtcttcatgtaaactctacacagaagcattctcagaaactgctttgggatgtttcaattgaagtcccagtgttgaacattcccattcatagagcaggtttgaaacactctttttgtactatctggaagtggacatttggagcgctttcaggtctacggtgaaaaaggagatatcttccaataaaaactagatagaagcaatgtcagaacttttttcatgatgtatctactcagctaacagagttgaacctttcttttgagagagcagttttgaaacactctttttgtggaatatgcaagtgggtattaggccagcttggaggatttcgttggaaacgggaatacgtataaaaagcagacagcagcattgtcagaaactactttgtgatgtttgcattcaagtcacagaattgaacactccctttcacagagcaggtttgaaacactctttttgtagtgtctgtaagtgaacatatggattgctttcaggcctaaggtgaaaaaggaaatatcttcccataaaaactagacagaagcattctcagaaacttgtttgtgatgtgtgccctctactgacagagttgaacctttctttgcaaagagcagttttgaaacactctttttgtagaatctgcaagaggatatttggatagctttgaagatttcttgggaaacgggaatgtctttagataaactctagacagaagcattctcagaaacttctttgggatgtttcaattgaagtcacagtgttgaacattccctttcacagagcaggtttgaaacactctttttgtagtgtctataagtgaacatttggcgtgctttcaggcctaacgtgaaaaaggaaatatcttcccataaaaactagacagaagcattctcagaaacttgttcttgatgtgtcccctctactgacagagttgaacctttctttgcaaagagcagctttgaaacacactttttgtagaatctgcaagaggatatttggatagctttgaggatttcgttggaaacgggtatgtcttcagataaactctagacagaagcattctcagaaacttctttgggatgttgcattcaagtcacagagtagaacattcccattcatagagcagatttgaaacactctttttgtagtatctggaagtggacatttggagcgctttcaggcctatgttgaaaaaggaaatatcttcccataaaaactagacggaagcattctcagaaacttatttgtgatgtgtttgctcaactaacaggattgaaccatcgttttgaaggagcagttttgaaacactgttttcgtggaatctgcaagtggatatttggctagctttgaggatttcgttggaaatgggattacatatacaaaggagacagcagcattctcagaaacttctttgtgatgtctgcattcaattcacagagttgagcattccctttcatagagcaggttggaaacactctttttgtagtatctggatgaggacatttggagcgctttctggcctatggtgaaaaaggaaatatcttcctgtaaaaactagacagaagcattctcagaagtttatttgtgatgtgtgccctcaactaacagagttgaacctttcttttgatagagcagttttgaaacactctttttgtaaaatctgcaagaggatatttggatagctttgaggatttcgttgcaaacgggaatggcttcatataaactctagacagaaagcattctcagaaacttcgttgggatgtttcgattgaagtcccagtgttgaacattcccttttatagagcaggttggaaacactctttctgcattccctggaagtggacatttggagcgctttcaggacgacggtgaaaatggaaatatcttccaagaaaatctagatagaagcaatgtcagaaacttttatgtgatggatctactcagctaacagagttgaacctttcttttgagagagcagttttgcaacactctttttgtggaatatgcaagtggatattagggcagctttgaggatttcgttggaaacgggaatacatgtaaaaagcagacagcaagcattctcagcaaacttctttgtgatgtttgcattgaagtcacagtagtagaacattccctttgagagagcaggtttgaaacacgccttttgtcatatctggaagtgtccattcggagcgcattcaggcttgtgttgaaaaaggaaatatcctcccagaaaaactagacagaagcattctcagaaacttatctgtgatgtatgtactcaactaacagaactaaaccatcgttttgaaggagcagttttgaaacactctttttgcggaatctgcaagtggatatttggctagctgggaggatttcgttggaaacgggattacatacaaaaagcagacagcagcattctcagaaacttctttgtgatgtttgcattcaagtcacagagttgaacattccctttcatagagcaggtttgaaacactctttttgtagtatctggatgtggacatttggatcgctttcaggcctatggtgaaaaaggaaatatcttcccatgaaaactagacagaagcattctcagaaacttatttgtgatgtgtgccctcaactgacagtgttgaacctttgttttgatagagcagttctgaaacacactttttgtaaaatctgcaagaggatatttggatagctttgaggatttcgttggaaacgggaatgtcttcatgtaaactctggacagaagcattcccagaaactgctttgggatgtttcaattgaagtcccagtgttgaacattccctttcatagagcaggtttgaaacactctttttgtactatctggaagtggacatttggagcgctttcaggtctacggtgaaaaaggagatatcttccaataaaaactagatagaagcaatgtcagaacttttttcatgatgtatctactcagcaaacagagttgaacctttcttttgagagagcagttttgaaacactctttctgtggaatatgcaagtgggtattaggccagcttggaggatttcgttggaaacgggaatacgtataaaaagcagacagcagcattgtcagaaactactttgtgatgtttgcatgcaagtcacagaatggaacactgcctttcacagagcaggtttgaaacactctttttgtagtgtctgtaagtgaacatttggattgctttcaggcctaaggtgaaaaaggaaatatcttcccataaaaactagacagaagcattctcagaaacttgtttgtgatgtgtgccctctactgacagagttgaacctttctttgcaaagagcagttttgaaacactctttttgtagaatctgcaagaggatatttggagagctttgaggatttcttgggaaacgggaatgtcttcagataaactctagacagaagcattctcagaaacttctttgggatgtttcaattgaagtcacagtgttgaacattccctttcacagagcaggtttgaaacactctttttgtagtgtctataagtgaacatttggcgtgctttcaggcctaacgtgaaaaaggaaatatcttcccataaaaactagacagaagcattctcagaaacttgttcttgatgtgtcccctctactgacagagttgaacctttctttgcaaagagcagctttgaaacactctttttgtagaatctgcaagaggatatttggatagcttggaggatttcgttggaaacgggtatgtcttcagataaactctagacagaagcattctcagaaacttctttgggatgttgcattcaagtcacagagtagaacattcccattcatagagcagatttgaaacactctttttgtagtatctggaagtggacatttggagcgctttcaggcctatgttgaaaaaggaaatatcttcccataaaaactagacggaagcattctctgaaacttatttgtgatgtgtttgctcaactaacaggattgaaccatcgttttgaaggagcagttttgaaacactgttttcgtggaatctgcaactggatatttggctagctttgaggatttcgttggaaacgggattacatataaaaaggagacagcagcattctcagaaacttctctgtgatgtttgcattcaagtcacagatttgaatattccctttcatagagcaggtttgaaacactctttttgtagtatctggaagtggacattgagagcgctctcaggactacggtgaaaaaggaaatatcttccaataaaagctacatagaagcaatgtcagaaactttttcatgatatatctactcagctaacagagatcaatctttcttttgagagagcagttttaaaacagtctctttgtggaatatgcaagtggatattaagccagctttgaggatttccttggaaacgggaatgcatataaaaagcagacagcagcattctcagaaacttctttgtgatgtttgcattgaagtcccagatttgaacattccctttcatagagcaggtttgaaacacgccttttgtcatatctggaagttgtccatttggagcgcattccggcttgtgttgaaaaaggaaatatcctcccataaaaactagatagaagcattctcagaaacttatttgtgatgtgtgtactcaactaacagagttgaacctttcttttgagagagcagttttgaaacactctttttgtggaatctgcaagtggatatttgtctagctttgaggatttcgttcgaaacgggattacatataaaaagcagacagcagcattcccagaatcttctttgtgatgtttgcattcaagtcacagagttgaacattccctttcatagagcaggtttgaaacactctttttgtagtatctggatgtggacatttggagcgctttcaggcctatggtgaaaaaggatatatcttcccctgaaaactacacagaagcattctcagaagtttatttgtgatgtgtgccctcaactaacagagttgaacctttcttttgatagagcagttttgaaacactctttttgtaaaatctgcaagaggatatttggatagctttgaggatttcgttgcaaacgggaatggcttcatataaactctagacagaagcattctcagaaacttcgttgggatgtttcgattgaagtcccagtgttgaacattcccttttatagagcaggttggaaacactctttctgcattccctggaagtggacatttggagcgctttcaggacgacggtgaaaatggaaatatcttccaataaaatctagatagaagcaacgtcagaaacttttatgtgatggatctactcagctaacagagttgaacctttcttttgagagagcagttttgcaacactctttttgtggaatatgcaagtggatattagggcagctttgaggatttcgttggaaacgggaatacatgtaaaaagcagacagcagcattctcagaaacttctttgtgatgtttgcattgaagtcacagagttgaacattccctttgagagagcaggtttgaaacacaccttttgtcatatctggaagtgtccattcggagcgcattcaggcttgtgttgaaaaaggaaatatcctcccataaaaactagacagaagcattctcagaaacttatttgtgatgtatgtactcaagtaacagaactaaaccatcgttttgaaggagcagttttgaaacactctttttgcggaatctgcaagtggatatttggctagctgggaggatttcgttggaaacgggattacatacaaaaagcagacagcagcattctcagaaacttatttgtgatgtgtgccctcaactgacagtgttgaacctttgttttgatagagcagttctgaaacacacttgttgtaaaatctgcaagaggatatttggatagctttgaggatttcgttggaaacgggaatgtcttcatgtaaactctagacagaagcattctcagaaactgctttgggatgtttcaattgaagtcccagcgttgaacattcccattcatagagcaggtttgaaacactctttttctactatctggaagtggacatttggagcgctttcaggtctacggtgaaaaaggagatatcttccaataaaaactagatagaagcaatgtcagaacttttttcatgatgtatctactcagcaaacagagttgaacctttcttttgagagagcagttttgacacagtctttgtggaatatgcaagtgggtattaggccagcttggaggatttcgttggaaacgggaatacgtataaaaagcagacagcagcattgtcagaaactactttgtgatgtttgcattcaagtcacagaattgaacactccctttcacagagcaggtttgaaacactctttttgtagtgtctgtaagtgaacatttggattgctttcaggcctaaggtgaaaaaggaaatatcttcccataaaaactagacagaagcattctcagaaacttgtttgtgatgtgtgccctctactgacagagttgaacctttctttgcaaagagcagttttgaaacactctttttgtagaatctgcaagaggatatttggatagctttgaggatttcttgggaaacgggaatgtcttcagataaactctagacagaagcattctcagaaacttctttgggatgtttcaattgaagtcacagtgttgaacattccctttcacagagcaggtttgaaacactctttttgtagtgtctataagtgaacatttggcgtgctttcaggcgtaacgtgaaaaaggaaatatcttcccataaaaactagacagaagcattctcagaaacttgttcttgatgtgtcccctctactgacagagttgaacctttctttgcaaagagcagctttgaaacactctttttgtagaatctgcaagaggatatttggatagcttggaggatttcgttggaaacgggtatgtcttcagataaactctagacagaagcattctcagaaacttctttgggatgttgcattcaagtcacagagtagaacattcccattcatagagcagatttgaaacactctttttgtagtatctggaagtggacatttggagcgctttcaggcctatgttgaaaaaggaaatatcttcccataaaaactagacggaagcattctcagaaacttatttgtgatgtgtttgctcaactaacaggattgaaccatcgttttgaaggagcagttttgaaacactgttttcgtggaatctgcaagtggatatttggctagctttgaggatttcgttggaaatgggattacatatacaaaggagacagcagcattctcagaaacttctttgtgatgtctgcattcaattcacagagttgagcattccctttcatagagcaggttggaaacactctttttgtagtatctggatgaggacatttggagcgctttctggcctatggtgaaaaaggaaatatcttcctgtaaaaactagacagaagcattctcagaagtttatttgtgatgtgtgccctcaactaacagagttgaacctttcttttgatagagcagttttgaaacactctttttgtaaaatctgcaagaggatatttggatagctttgaggatttcgttgcaaacgggaatggcttcatataaactctagacagaagcattctcagaaacttcgttgggatgtttcgattgaagtcccagtgttgaacattcccttttatagagcaggttggaaacactctttctgcattccctggaagtggacatttggagcgctttcaggacgacggtgaaaatggaaatatcttccaagaaaatctagatagaagcaatgtcagaaacttttatgtgatggatctactcagctaacagagttgaacctttcttttgagagagcagttttgcaacactctttttgtggaatatgcaagtggatattagggcagctttgaggatttcgttggaaacgggaatacatgtaaaaagcagacagcagcattctcagaaacttctttgtgatgtttgcattgaagtcacagagttgaacattccctttgagagagcaggtttgaaacacgccttttgtcatatctggaagtgtccattcggagcgcattcaggcttgtgttgaaaaaggaaatatcctcccataaaaactagacagaagcattctcagaaacttatctgtgatgtatgtactcaactaacagaactaaaccatcgttttgaaggagcagttttgaaacactctttttgcggaatctgcaagtggatatttggctagctgggaggatttcgttggaaacgggattacatacaaaaagcagacagcagcattctcagaaacttctttgtgatgtttgcattcaagtcacagagttgaacattccctttcatagagcaggtttgaaacactctttttgtagtatctggatgtggacatttggatcgctttcaggcctatggtgaaaaaggaaatatcttcccatgaaaactagacagaagcattctcagaaacttatttgtgatgtgtgccctcaactgacagtgttgaacctttgttttgatagagcagttttgaaacacactttttgtaaaatctgcaagaggatatttggatagctttgaggatttcgttggaaacgggaatgtcttcatgtaaactctagacagaagcattctcagaaactgctttgggatgtttcaattgaagtcccagtgttgaacattccctttcatagagcaggtttgaaacactctttttgtactatctggaagtggacatttggagcgctttcaggtctacggtgaaaaaggagatatcttccaataacaactagatagaagcaatgtcagaacttttttcatgatgtatctactcagcaaacagagttgaacctttcttttgagagagcagttttgaaacactctttttgtggaatatgcaagtgggtattaggccagcttggaggatttcgttggaaacgggaatacgtataaaaagcagacagcagcattgtcagaaactactttgtgatgtttgcattcaagtcacagaattgaacactccctttcacagagcaggtttgaaacactctttttgtagtgtctgtaagtgaacatttggattgctttcaggcgtaaggtgaaaaaggaaatatcttcccataaaaactagacagaagcattctcagaaacttgtttgtgatgtgtgccctctactgacagagttgaacctttctttgcaaagagcagttttgaaacactctttttgtagaatctgcaagaggatatttggatagctttgaggatttcttgggaaacgggaatgtcttcagataaactctagacagaagcattctcagaaacttctttgggatgtttcaattgaagtcacagtgttgaacattccctttcacagagcaggtttgaaacactctttttgtagtgtctataagtgaacatttggcgtgctttcaggcctaacgtgaaaaaggaaatatcttcccataaaaactagacagaagcattctcagaaacttgttcgtgatgtgtgccctctactgacagagttgaacctttctttgcaaagagcagctttgaaacactctgtttgtagaatctgcaagaggatatttggatagctttgaggatttcgttggaaacgggtatgtcttcagttaaactctagacagaagcattctcagaaacttctttgggatgttgcattcaagtcacagagtagaacattcccattcatagagcagatttgaaacactctttttgtagtatctggaagtggacatttggagcgctttcaggcctatgttgaaaaaggaaatatcttcccataaaaactagacggaagcattctcagaaacttatttgtgatgtgtttgctcaactaacaggattgaaccatcgttttgaaggagcagttttgaaacactgttttcgtggaatctgcaagtggatatttggctagctttgaggatttcgttggaaaagggattacatataaaaaggagacagcagcattctcagaaacttctttgtgatgtttgcattcaattcacagagttgagcattccctttcatagagcaggttggaaacactctttttgtagtatctggatgtggacatttggatcgctttcaggcctatggtgaaaaaggaaatatcttcccatgaaaactagacagaagcattctcagaaacttatttgtgatgtgtgccctcaactgacagtgttgaacctttgttttgatagagcagttctgaaacacactttttgtaaaatctgcaagaggatatttggatagctttgaggatttcgttggaaacgggaatgtcttcatgtaaactctagacagaagcattctcagaaactgctttgggatgtttcaattgaagtcccagtgttgaacattccctttcatagagcaggtttcaaacactctttttgtactatctggaagtggacatttggagcgctttcaggtctacggtgaaaaaggagatatcttccaataaaaactagatagaagcaatgtcagaacttttttcatgatgtatctactcagcaaacagagttgaacctttcttttgagagagcagttttgaaacactctttttgtggaatatgcaagtgggtattaggccagcttggaggatttcgttggaaacgggaatacgtataaaaagcagacagcagcattgtcagaaactactttgtgatgtttgcattcaagtcacagaattgaacactccctttcacagagcaggtttgaaacactctttttgtagtgtctgtaagtgaacatttggattgctttcaggcctaaggtgaaaaaggaaatatcttcccataaaaactagacagaagcattctcagaaacttgtttgtgatgtgtgccctctactgacagagttgaacctttctttgcaaagagcagttttgaaacactctttttgtagaatctgcaagaggatatttggatagctttgaggatttcttgggaaacgggaatgtcttcagataaactctagacagaagcattctcagaaacttctttgggatgtttcaattgaagtcacagtgttgaacattccctttcacagagcaggtttgaaacactctttttgtagtgtctataattgaacatttggcgtgctttcaggcctaacgtgaaaaaggaaatatcttcccataaaaactagacagaagcattctcagaaacttgttcgcgatgtgtgccctctactgacagagttgaacctttctttgcaaagagcagctttgaaacactctttttgtagaatctgcaagaggatatgtggatagcttttaggatttcgttggaaacgggtatgtcttcagataaactctagacagaagcattctcagaaacttctttgggatgtttcaattgaagtcacagtgttgaacattccctttcacagagcaggtttgaaacactctttttgtagtgtctataagtgaacatttggcgtgctttcaggcctaacgtgaaaaaggaaatatcttcccataaaaactagacagaagcattctcagaaacttgttcgtgatgtgtgccctctactgacagagttgaacctttctttgcaaagagcagctttgaaacactctttttgtagaatctgcaagaggatatttggatagctttgaggatttcgttggaaacgggtatgtcttcagataaactctagacagaagcattctcagaaacttctttgggatgttgcattcaagtcacagagtagaacattcccattcatagagcagatttgaaacactctttttgtagtatctggaagtggacatttggagcgctttcaggcctatgttgaaaaaggaaatatcttcccataaaaactagacggaagcattctcagaaacttacttgtgatgtgtttgctcaactaacagaattgaaccatcgttttgaaggagcagttttgaaacactgttttcgtggaatctgcaagtggatatttggctagctttgaggatttcgttggaaacgggattacatataaaaaggagacagcagcattctcagaaacttctttgtgatgtctgcattcaagtcacagagttgagcattccctttcatagagcaggttggaaacactctttttgtagtatctggatgaggacatttggagcgctttcaggcgtatggtgaaaaaggaaatatcttcccgtaaaaactagacagaagcattctcagaaatttatttgtgatgtgtgccctcaactaacagagttgaacctttcttttgatagagcagttttgaaacactctttttgtaaaatctgcaagaggatatttggatagctttgaggatttcgttgcaaacgggaatggcttcatataaactctagacagaagcattctcagaaacttcgttgggatgtttcgattgaagtcccagtgttgaacattcccttttatagagcaggttggaaacactctttctgcattccctggaagtggacatttggagcgctttcaggacgacggtgaaaatggaaatatcttccaagaaaatctagatagaagcaacgtcagaaacttttatgtgatggatctactcagctaacagagttgaacctttcttttgagagagcagttttgcaacactctttttgtggaatatgcaagtggatattagggcagctttgaggatttcgttggaaacgggaatacatgtaaaaagcagacagcagcattctcagaaacttctttgtgatgtttgcattgaagtcacagagttgaacattccctttgagagagcaggtttgaaacacgccttttgtcatatctggaagtgtccattcggagcgcattcaggcttgtgttgaaaaaggaaatatcctcccataaaaactagacagaagcattctcagaaacttatctgtgatgtatgtactcaactaacagaactaaaccatcgttttgaaggagcagttttgaaacactctttttgcggaatctgcaagtggatatttggctagctgggaggatttcgttggaaacgggattacatacaaaaagcagacagcagcattctcagaaacttctttgtgatgtttgcattcaagtcacagagttgaacattccctttcatagatcaggtttgaaacactctttttgtagtatctggatgtggacatttggatcgctttcaggcctatggtgaaaaaggaaatatcttcccatgaaaactagacagagtaagcattctcagaaacttatttgtgatgtgtgccctcaactgacagtgttgaacctttgttttgatagagcagttctgaaacacactttttgtaaaatctgcaagaggatatttggatagctttgaggatttcgttggaaacgggaatgtcttcatgtaaactctacacagaagcattctcagaaactgctttgggatgtttcaattgaagtcccagtgttgaacattcccattcatagagcaggtttgaaacactctttttgtactatctggaagtggacatttggagcgctttcaggtctacggtgaaaaaggagatatcttccaataaaaactagatagaagcaatgtcagaacttttttcatgatgtatctactcagcaaacagagttgaacctttcttttgagagagcagttttgaaacactctttttgtggaatatgcaagtgggtattaggccagcttggaggatttcgttggaaacgggaatacgtataaaaagcagacagcagcattgtcagaaactactttgtgatgtttgcattcaagtcacagaactgaacactccctttcacagagcaggtttgaaacactctttttgtagtgtctgtaagtgaacatttggattgctttcaggcctaaggtgaaaaaggaaatatcttcccataaaaactagacagaagcattctcagaaacttgttggtgatgtgtgccctctactgacagagttgaacctttctttgcaaagagcagttttgaaacactctttttgtagaatctgcaagaggatatttggatagctttgaagatttcttgggaaacgggaatgtcttcagataaactctagacagaagcattctcagaaacttctttgggatgtttcaattgaagtcacagtgttgaacattccctttcacagagcaggtttgaaacactctttttgtagtgtctataattgaacatttggcgtgctttcaggcctaacgtgtaaaaggaaatatcttcccataaaaactagacagaagcattctcagaaacttgttcgtgatgtgtgccctctactgacagagttgaacctttctttgcaaagagcagctttgaaacactctttttgtagaatctgcaagaggatatgtggatagatttgaggatttcgttggaaacgggtatgtcttcagataaactctagacagaagcattctcagaaacttctttgggatgtttcaattgaagtcacagtgttgaacattccctttcacagagcaggtttgaaacactctttttgtagtgtctataagtgaacatttggcgtgctttcaggcgtaacgtgaaaaaggaaatatcttcccataaaaaccagacagaagcattctcagaaacttgttcgtgatgtgtgccctctactgacagagttgaacctttctttgcaaagagcatctttgaaacactctttttgtagaatctgcaagaggatatttggatagcttggaggatttcgttggaaacgggtatgtcttcagataaactctagacagaagcattctcagaaacttctttgggatgttgcattcaagtcacagagtagaacattcccattcatagagcagatttgaaacactctttttgtagtatctggaagtggacatttggagcgctttcaggcctatgttgaaaaaggaaatatcttcccataaaaactagacggaagcattctcagaaacttacttgtgatgtgtttgctcaactaacagaattgaaccatcgttttgaaggagcagttttgaaacactgttttcgtggaatctgcaagtggatatttggctagctttgaggatttcgttggaaacgggattacatataaaaaggagacagcagcattctcagaaacttctttgtgatgtctgcattcaagtcacagagttgagcattccctttcatagagaaggttggaaacactctttttgtagtatctggatgaggacatttggagcgctttcaggcgtatggtgaaaaaggaaatatcttcccgtaaaaactagacagaagcattctcagaaatttatttgtgatgtgtgccctcaactaacagagttgaacctttcttttgatagagcagttttgaaacactctttttgtaaaatctgcaagaggatatttggatagctttgaggatttcattgcaaacgggaatggcttcatataaactctagacagaagcattctcagaaacttcgttgggatgtttcgattgaagtcccagtgttgaacattcccttttatagagcaggttggaaacactctttctgcattccctggaagtggacatttggagcgctttcaggacgacggtgaaaatggaaatatcttccaagaaaatctagatagaagcaatgtcagaaacttttatgtgatggatctactcagctaacagagttgaacctttcttttgagagagcagttttgcaacactctttttgtggaatatgcatgtggatattagggcagctttgaggatttcgttggaaacgggaatacatgtaaaaagcagacagcagcattctcagaaacttctttgtgatgtttgcattgaagtcacagagttgaacattccctttgagagagcaggtttgaaacacgccttttgtcatatctggaagtgtccattcggagcgcattcaggcttgtgttgaaaaaggaaatatcctcccataaaaactagacagaagcattctcagaaacttatctgtgatgtatgtactcaactaacagaactaaaccatcgttttgaaggagcagttttgaaacactctttttgcggaatctgcaagtggatatttggctagctgggaggatttcgttggaaacgggattacatacaaaaagcagacagcagcattctcagaaacttctttgtgatgtttgcattcaagtcacagagttgaacattccctttcatagagcaggtttgaaacactctttttgtagtatctggatgtggacatttggatcgctttcaggcctatggtgaaaaaggaaatatcttcccatgaaaactagacagaagcattctcagaaacttatttgtgatgtgtgccctcaactgacagtgttgaacctttgttttgatagagcagttctgaaacacactttttgtgaaatctgcaagaggatatttggatagctttgaggatttcgttggaaacgggaatgtcttcatgtaaactctacacagaagcattctcagaaactgctttgggatgtttcaattgaagtcccagtgttgaacattcccattcatagagcaggtttgaaacactctttttgtactatctggaagtggacatttggagcgctttcaggtctacggtgaaaaaggagatatcttccaataaaaactagatagaagcaatgtcagaacttttttcatgatgtatctactcagcacacagagttgaacctttcttttgagagagcagttttgaaacactctttttgtggaatatgcaagtgggtattaggccagcttggaggatttcgttggaaacgggaatacgtataaaaagcagacagcagcattgtcagaaactactttgtgatgtttgcattcaagtcacagaattgaacactccctttcacagagcaggtttgaaacactctttttgtagtgtctgtaagtgaacatatggattgctttcaggcctaaggtgaaaaaggaaatatcttcccataaaaactagacagaagcattctcagaaacttgtttgtgatgtgtgccctctactgacagagttgaacctttctttgcaaagagcagttttgaaacactctttttgtagaatctgcaagaggatatttggatagctttgaggatttcttgggaaacgggaatgtcttcagataaactctagacagaagcattctcagaaacttctttgggatatttcaattgaagtcacagtgttgaacattccctttcacagagcaggtttgaaacactctttttgtagtgtctataagtgaacatttgtcgtgctttcagacctaaggtgaaaaaggaaatatcttcccataaaaactagacagaagcattctcagaaacttgttcgtgatgtgtgccctctactgacagagttgaacctttctttgcaaagagcagctttgaaacactctttttgtagaatctgcaagaggatatttggatagctttgaggatttcgttggaaacgggtatgtcttcagataaactctagacagaagcattctcagaaacttctttgggatgttgcattcaagtcacagagtagaacattcccattcatagagcagatttgaaacactctttttgtagtatctggaagtggacatttggagcgctttcaggcctatgttgaaaaaggaaatatcttcccataaaaactagacggaagcattctcagaaacttacttgtgatgtgtttgctcaactaacagaattgaaccatcgttttgaaggagcagttttgaaacactgttttcgtggaatctgcaagtggatatttggctagctttgaggatttcgttggaaacgggattacatataaaaaggagacagcagcattctcagaaacttctttgtgatgtctgcattcaagtcacagagttgagcattccctttcatagagcaggttggaaacactctttttgtagtatctggatgaggacatttggagcgctttcaggcgtatggtgaaaaaggaaatatcttcctgtaaaaactagacagaagcattctcagaaatttatttgtgatgtgtgccctcaactaacagagttgaacctttcttttgatagagcagttttgaaacactctttttgtaaaatctgcaagaggatatttggatagctttgaggatttcgttgcaaacgggaatggcttcatataaactctagacagaagcattctcagaaacctcgttgggatgtttcgattgaagtcccagtgttgaacattcccttttatagagcaggttggaaacactctttctgcattccctggaagtggacatttggagcgctttcaggacgacggtgaaaatggaaatatcttccaagaaaatctagatagaagcaacgtcagaaacttttctgtgatggatctactcagctaacagagttgaacctttcttttgagagagcagttttgcaacactctttttgtggaatatgcaagtggatattagggcagctttgaggatttcgttggaaacgggaatacatgtaaaaagcagacagcagcattctcagaaacttctttgtgatgtttgcattgaagtcacagagttgaacattccctttgagagagcaggtttgaaacacgccttttgtcatatctggaagtgtccattcggagcgcattcaggcttgtgttgaaaaaggaaatatcctcccataaaaactagacagaagcattctcagaaacttatctatgatgtatgtactcaactaacagaactaaaccatcgttttgaaggagcagttttgaaacactctttttgcggaatctgcaagtggatatttggctagctgggaggatttcgttggaaacgggattacatacaaaaagcagacagcagcattctcagaaacttctttgtgatgtttgcattcaagtcacagagttgaacattccctttcatagagcaggtttgaaacactctttttgtagtatctggatgtggacatttggatcgctttcaggcctatggtgaaaaaggaaatatcttcccatgaaaactagacagaagcattctcagaaacttatttgtgatgtgtgccctcaactgacagtgttgaacctttgttttgatagagcagttctgaaacacactttttgtaaaatctgcaagaggatatttggatagctttgaggatttcgttggaaacgggaatgtcttcatgtaaactctacacagaagcattctcagaaactgctttgggatgtttcaattgaagtcccagtgttgaacattcccattcatagagcaggtttgaaacactctttttgtactatctggaagtggacatttggagcgctttcaggtctacggtgaaaaaggagatatcttccaataaaaactagatagaagcaatgtcagaacttttttcatgatgtatctactcagcacacagagttgaacctttcttttgagagagcagttttgaaacactctttttgtggaatatgcaagtgggtattaggccagcttggaggatttcgttggaaacgggaatacgtataaaaagcagacagcagcattgtcagaaactactttgtgatgtttgcattcaagtcacagaattgaacactccctttcacagagcaggtttgaaacactctttttgtagtgtctgtaagtgaacatatggattgctttcaggcctaaggtgaaaaaggaaatatcttcccataaaaactagacagaagcattctcagaaacttgtttgtgatgtgtgccctctactgacagagttgaacctttctttgcaaagagcagttttgaaacactctttttgtagaatctgcaagaggatatttggatagctttgaagatttcttgggaaacgggaatgtcttcagataaactctagacagaagcattctcagaaacttctttgggatgtttcaattgaagtcacagtgttgaacattccctttcacagagcaggtttgaaacactctttttgtagtgtctataagtgaacatttggcgtgctttcaggcctaacgtgaaaaaggaaatatcttcccataaaaactagacagaagcattctcagaaacttgttcatgatgtgtgccctctactgacagagttgaacctttctttgcaaagagcagctttgaaacactctttttgtagaatctgcaagaggatatttggatagctttgaggatttcgttggaaacgggtatgtcttcagataaactctagacagaagcattctcagaaacttctttgggatgttgcattcaagtcacagagtagaacattcccattcatagagcagatttgaaacactctttttgtagtatctggaagtggacatttggagcgctttcaggcctatgttgaaaaaggaaatatcttcccataaaaactagacggaagcattctcagaaacttacttgtgatgtgtttgctcaactaacagaattgaaccatcgttttgaaggagcagttttgaaacactgttttcgtggaatctgcaagtcgatatttggctagctttgaggatttcgttggaaacgggattacatataaaaaggagacagcagcattctcagaaacttctttgtgatgtttgcattcaagtcacagagttgaacattccctttcatagagcaggtttgaaacactctttttgtagtatctggatgtggacatttggatcgctttcaggcctatggtgaaaaaggaaatatcttcccatgaaaattagacagaagcattctcagaaacttatttgtgatgtgtgccctcaactgacagtgctgaacctttgttttgatagagcagttctgaaacacactttttgtaaaatctgcaagaggatatttggatagctttgaggatttcgttggaaacgggaatgtcttcatgtaaactctagacagaagcattctcagaaactgctttgggatgtttcaattgaagtcccagtgttgaacattccctttcatagagcaggtttgaaacactctttttgtactatctggaagtggacatttggagcgctttcaggtctacggtgaaaaaggagatatcttccaataaaaactagatagaagcaatgtcagaacttttttcatgatgtatctactcagcaaacagagttgaacctttcttttgagagagcagttttgaaacactctttttgtggaatatgcaagtgggtattaggccagcttggaggatttcgttggaaacgggaatacgtataaaaagcagacagcagcattgtcagaaactactttgtgatgtttgcattcaagtcacagaattgaacactccctttcacagagcaggtttgaaacactctttttgtagtgtctgtaagtgaacatttggattgctttcaggcctatgtgaaaaaggaaatatcttcccataaaaactagacagaagcattctcagaaacttgtttgtgatgtgtgccctctactgacagagttgaacctttctttgcaaagagcagttttgaaacactctttttgtagaatctgcaagaggatatttggatagctttgaggatttcttgggaaacgggaatgtcttcagataaactctagacagaagcattctcagaaacttctttgggatatttcaattgaagtcacagtgttgaacattccctttcacagagcaggtttgaaacactctttttgtagtgtctataagtgaacatttggcgtgctttcaggcgtaacgtgaaaaaggaaatatcttcccataaaaacgagacagaagcattctcagaaacttgttcgtgatgtgtgccctctactgacagagttgaacctttctttgcaaagagcagctttgaaacactctttttgtagaatctgcaagaggatatttggatagctttgaggatttcgttggaaacgggtatgtcttcagataaactctagacagaagcattctcagaaacttctttgggatgttgcattcaagtcacagagtagaacattcccattcatagagcagatttgaaacactctttttgtagtatctggaagtggacatttggagcgctttcaggcctatgttgaaaaaggaaatatcttcccataaaaactagacggaagcattctcagaaacttacttgtgatgtgtttgctcaactaacagaattgaaccatcgttttgaaggagcagttttgaaacactgttttcgtggaatctgcaagtggatatttggctagctttgaggatttcgttggaaacgggattacatataaaaaggagacagccgcattctcagaaacttctttgtgatgtctgcattcaagtcacagagttgagcattccctttcatagagcaggttggaaacactctttttgtagtatctggatgaggacatttggagcgctttcaggcgtatggtgaaaaaggaaatatcttcccgtaaaaactagacagaagcattctcagaaatttatttgtgatgtgtgccctcaactaacagagttgaacctttcttttgatagagcagttttgaaacactctttttgtaaaatctgcaagaggatatttggatagctttgaggatttcgttgcaaacgggaatggcttcatataaactctagacagaagcattctcagaaacttcgttgggatgtttcgattgaagtcccagtgttgaacattcccttttatagagcaggttggaaacactctttctgcattccctggaagtggacatttggagcgctttcaggacgacggtgaaaatggaaatatcttccaagaaaatctagatagaagcaacgtcagaaacttttatgtgatggatctactcagctaacagagttgaacctttcttttgagagagcagttttgcaacactctttttgtggaatatgcaagtggatattagggcagctttgaggatttcgttggaaacgggaatacatgtaaaaagcagacagcagcattctcagaaacttctttgtgatgtttgcattgaagtcacagagttgaacattccctttgagagagcaggtttgaaacacgccttttgtcatatctggaagtgtccattcggagcgcattcaggcttgtgttgaaaaaggaaatatcctcccataaaaactagacagaagcattctcagaaacttatctgtgatgtatgtactcaactaacagaactaaaccatcgttttgaagggcagttttgaaacactctttttgcggaatctgcaagtggatatttggctagctgggaggatttcgttggaaacgggattacatacaaaaagcagacagcagcattctcagaaacttctttgtgatgtttgcattcaagtcacagagttgaacattccctttcatagagcaggtttgaaacactctttttgtagtatctggatgtggacatttggatcgctttcaggcctatggtgaaaaaggaaatatcttcccatgaaaactagacagaagcattctcagaaacttatttgtgatgtgtgccctcaactgacagtgttgaacctttgttttgatagagcagttctgaaacacactttttgtaaaatctgcaagaggatatttggatagctttgaggatttcgttggaaacgggaatgtcttcatgtaaactctacacagaagcattctcagaaactgctttgggatgtttcaattgaagtcccagtgttgaacattcccattcatagagcaggtttgaaacactctttttgtactatctggaagtggacatttggagcgctttcaggtctacggtgaaaaaggagatatcttccaataaaaactagatagaagcaatgtcagaacttttttcatgatgtatctactcagcaaacagagttgaacctttcttttgagagagcagttttgaaacactctttttgtggaatatgcaagtgggtattaggccagcttggaggatttcgttggaaacgggaatacgtataaaaagcagacagcagcattgtcagaaactactttgtgatgtttgcattcaagtcacagaattgaacactccctttcacagagcaggtttgaaacactctttttgtagtgtctgtaagtgaacatttggattgctttcaggcctaaggtgaaaaaggaaatatcttcccataaaaactagacagaagcattctcagaaacttgttcgtgatgtgtgccctctactgacagagttgaacctttctttacaaagagcagctttgaaacacactttttgtagaatctgcaagaggatatttggatagctttgaggatttcgttggaaacgggtatgtcttcagataaactctagacagaagcattctcagaaacttctttgggatgttgcatgcaagtcacagagtagaacattcccattcatagagcagatttgaaacactctttttgtagtatctggaagtggacatttggagcgctttcaggcctatgttgaaaaaggaaatatcttcccataaaaactagacggaagcattctcagaaacttaattgtgatgtgtttgctcaactaacaggattgaaccatcgttttgaaggagcagttttgaaacactgttttcgtggaatctgcaagtggatatttggctagctttgaggatttcgttggaaacgggattacatataaaaaggagacagcagcattctcagaaacttctttgtgatgtctgcattcaagtcacagagttgagcattccctttcatagagaaggttggaaacactctttttgtagtatctggatgaggacatttggagcgctttcaggcgtatggtgaaaaaggaaatatcttcccgtaaaaactagacagaagcattctcagaaatttatttgtgatgtgtgccctcaactaacagagttgaacctttcttttgatagagcagttttgaaacactctttttgtaaaatctgcaagaggatatttggatagcttggaggatttcattgcaaacgggaatggcttcatataaactctagacagaaagcattctcagaaacttcgtcgggatgtttcgattgaagtcccagtgttgaacattcccttttatagagcaggttggaaacactctttctgcattccctggaagtggacaattggagcgctttcaggacgacggtgaaaatggaaatatcttccaataaaatctggatagagcaatgtcagaaacttttctgtgatggatctactcagctaacagagttgaacctttcttttgagagagcagttttgcaacactctttttgtggaatatgcaagtggatattagggcagctttgaggatttcgttggaaacgggaatacatgtaaaaagcagacagcagcattctcagaaacttctttgtgatgtttgcattgaagtcacagagttgaacattccctttgagagagcaggtttgaaacacgccttttgtcatatctggaagtgtccattcggagcgcattcaggcttgtgttgaaaaaggaaaatatcctcccataaaaactagacagaagcattctcagaaacttatctgtgatgtatgtactcaactaacagaactaaaccatcgttttgaaggagcagttttgaaacactctttttgcggaatctgcaagtggatatttggctagctgggaggatttcgttggaaacgggattacatacaaaaagcagacagcagcattctcagaaacttctttgtgatgtttgcattcaagtcacagagttgaacattccctttcatagagcaggtttgaaacactctttttgtagtatctggatgtggacatttggatcgctttcaggcctatggtgaaaaaggaaatatcttcccatgaaaactagacagaagcattctcagaaacttatttgtgatgtgtgccctcaactgacagtgttgaacctttgttttgatagagcagttctgaaacacactttttgtaaaatctgcaagaggatatttggatagctttgaggatttcgttgaaacgggaatgtcttcatgtaaactctagacagaagcattctcagaaactgctttgggatgtttcaattgaagtcccagcgttgaacattcccattcatagagcaggtttgaaacactctttttgtactatctggaagtggacatttggagcgctttcaggtctacggtgaaaaaggagatatcttccaataaaaactagatagaagcaatatcagaacttttttcatgatgtatctactcagcaaacagagttgaacctttcttttgagagagcagttttgaaacactctttttgtggaatatgcaagtgggtattaggccagcttggaggatttcgttggaaacgggaatacgtataaaaagcagacagcagcattgtcagaaactactttgtgatgtttgcattcaagtcacagaattgaacactccctttcacagagcaggtttgaaacactctttttgtagtgtctgtaagtgaacatttggattgctttcaggcctaaggtgaaaaaggaaatatcttcccataaaaactagacagaagcattctcagaaacttgtttgtgatgtgtgccctctactgacagagttgaacctttctttgcaaagagcagttttgaaacactctttttgtagaatctgcaagaggatatttggatagctttgaggatttcttgggaaacgggaatgtcttcagataaactctagacagaagcattctcagaaacttctttgggatatttcaattgaagtcacagtgttgaacattccctttcacagagcaggtttgaaacactctttttgtagtgtctataagtgaacatttggcgtgctttcaggcctaacgtgaaaaaggaaatatcttcccataaaaactagacagaagcattctcagaaacttgttcgtgatgtgtgccctctactgacagagttgaacctttctttgcaaagagcagctttgaaacacactttttgtagaatctgccagaggatatttggatagctttgaggatttcgttggaaacgggtatgtcttcagataaactctagacagaagcattctcagaaacttctttgggatgttgcattcaagtcacagagtagaacattcccattcatagagcagatttgaaacactctttttgtagtatctggaagtggacatttggagcgctttcaggcctatgttgaaaaaggaaatatcttcccataaaaactagacggaagcattctcagaaacttacttgtgatgtgtttgctcaactaacagaattgaaccatcgttttgaaggagcagttttgaaacactgttttcgtggaatctgcaagtggatatttggctagctttgaggatttcgttggaaacgggattacatataaaaaggagacagcagcattctcagaaacttctttgtgatgtctgcattcaagtcacagagttgagcattccctttcatagagcaggttggaaacactctttgtgtagtatctggatgaggacatttggagcgctttcaggcctatggtgaaaaaggaaatatcttcccgtaaaaactagacagaagcattctcagaaatttatttgtgatgtgtgccctcaactaacagagttgaacctttcttttgatagagcagttttgaaacactctttttgtaaaatctgcaagaggatatttggatagctttgaggatttccttgcaaacgggaatggcttcatataaactctagacagaagcattctcagaaacttcgttgggatgtttcgattgaagtcccagtgttgaacattcccttttatagagcaggttggaaacactctttctgcattccctggaagtggacatttggagcgctttcaggacgacggtgaaaatggaaatatcttccaagaaaatctagatagaagcaacgtcagaaacttttctgtgatggatctactcagctaacagagttgaacctttcttttgagagagcagttttgcaacactctttttgtggaatatgcaagtggatattagggcagctttgaggatttcgttggaaacgggaatacatgtaaaaagcagacagcagcattctcagaaacttctttgtgatgtttgcattgaagtcacagagttgaacattccctttgagagagcaggtttgaaacacgccttttgtcatatctggaagtgtccattcggagcgcattcaggcttgtgttgaaaaaggaaatatcctcccataaaaactagacagaagcattctcagaaacttatctgtgatgtatgtactcaactaacagaactaaaccatcgttttgaaggagcagttttgaaacactctttttgcggaatctgcaagtggatatttggctagctgggaggatttcgttggaaacgggattacatacaaaaagcagacagcagcattctcagaaacttctttgtgatgtttgcattcaagtcacagagttgaacattccctttcatagagcaggtttgaaacactctttttgtagtatctggatgtggacatttggatcgctttcaggcctatggtgaaaaaggaaatatcttcccatgaaaactagacagaagcattctcagaaacttatttgtgatgtgtgccctcaactgacagtgttgaacctttgttttgatagagcagttctgaaacacactttttgtaaaatctgcaagaggatatttggatagctttgaggatttcgttggaaacgggaatgtcttcatgtaaactctacacagaagcattctcagaaactgctttgggatgtttcaattgaagtcccagtgttgaacattcccattcatagagcaggtttgaaacactctttttgtactatctggaagtggacatttggagcgctttcaggtctacggtgaaaaaggagatatcttccaataaaaactagatagaagcaatgtcagaacttttttcatgatgtatctactcagctaaccgagttgaacctttcttttgagagagcagttttgaaacactctttttgtggaatatgcaagtgggtattaggccagcttggaggatttcgttggaaacgggaatacgtataaaaagcagacagcagcattgtcagaaactactttgtgatgtttgcattcaagtcacagaattgaacactccctttcacagagcaggtttgaaacactctttttgtagtgtctataagtgaacatttggcgtgctttcaggcctaaggtgaaaaaggaaatatcttcccataaaaactagacagaagcattctcagaaacttgtttgtgatgtgtgccctctactgacagagttgaacctttctttgcaaagagcagctttgaaacactctttttgtagaatctgcaagaggatatttggatagctttgaggatttcttgggaaacgggaatgtcttcagataaactctagacagaagcattctcagaaacttctttgggatgttgcattcaagtcacagagtagaacattcccattcatagagcagatttgaaacactctttttgtagtatctggaagtggacatttggagcgctttcaggcctatgttgaaaaaggaaatatcttcccataaaaactagacggaagcattctcagaaacttatttgtgatgtgtttgctcaactaacaggattgaaccatcgttttgaaggagcagttttgaaacactgttttcgtggaatctgcaagtggatatttggctagcttgaggatttcgttggaaacgggattacatataaaaaggagacagcagcattctcagaaacttctttgtgatgtctgcattcaattcacagagttgagcattccctttcatagagcaggttggaaacactctttttgtagtatctggatgaggacatttggagcgctttcaggcctatggtgaaaaaggaaatatcttcccgtaaaaactagacagaagcattctcagaaatttatttgtgatgtgtgccctcaactaacagagttgaacctttcttttgatagagcagttttgaaacactctttttgtaaaatctgcaagaggatatttggatagctttgaggatttcgttgcaaacgggaatggcttcatataaactctagacagaagcattctcagaaacttctttgggatgtttcgattgaagtcccagtgttgaactttcccttttatagagcaggttggaaacactctttctgcattccctggaagtggacatttggagcgctttcaggacgacggtgaaaatggaaatatcttccaataaaatctacatagaagcaacgtcagaaacttttatgtgatggatctactcagctaacagagttgaacctttcttttgagagagcagttttgcaacactctttttgtggaatatgcaagtggatattagggcagctttgaggatttcgttggaaacgggaatacatgtaaaaagcagacagcagcattctcagaaacttctttgtgatgtttgcattgaagtcacagagttgaacattccctttgagagagcaggtttgaaacacgccttttgtcatatctggaagtgtccattcggagcgcattcaggcttgtgttgaaaaaggaaatatcctcccataaaaactagacagaagcattctcagaaacttatctgtgatgtatgtactcaactaacagaactaaaccatcgttttgaaggagcagttttgaaacactctttttgcggaatctgcaagtggatatttggctagctgggaggatttcgttggaaacgggattacatacaaaaagcagacagcagcattctcagaaacttctttgtgatgtttgcattcaagtcacagagttgaacattccctttcatagagcaggtttgaaacactctttttgtagtatctggatgtggacatttggatcgctttcaggcctatggtgaaaaaggaaatatcttcccatgaaaactagacagaagcattctcagaaacttatttgtgatgtgtgccctcaactgacagtgttgaacctttgttttgatagagcagttctgaaacacactttttgtaaaatctgcaagaggatatttggatagctttgaggatttcgttggaaacgggaatgtcttcatgtaaactctacacagaagcattctcagaaactgctttgggatgtttcaattgaagtcccagtgttgaacattcccattcataaagcaggtttgaaacactctttttgtactatctggaagtggacatttggagcgctttcaggtctacggtgaaaaaggagatatcttccaataaaaactagatagaaagcaatgtcagcaacttttttcatgatgtatctactcagcaaacagagttgaacctttcttttgagagagcagttttgaaacactctttttgtggaatatgcaagtgggtattaggccagcttggaggatttcgttggaaacgggaatacgtataaaaagcagacagcagcattgtcagaaactactttgtgatgtttgcattcaagtcacagaattgaacactccctttcacagagcaggtttgaaacactctttttgtagtgtctgtaagtgaacatttggattgctttcacgcctaaggtgaaaaaggaaatatcttcccataaaaactagacagaagcattctcagaaactagtttgtgatgtgtgccctctactgacagagttgaacctttctttgcaaagagcagttttgaaacactctttttgtagaatctgcaagaggatatttggatagctttgaggatttcttgggaaacgggaatgtcttcagataaactctagacagaagcattctcagaaacttctttgggatgtttcaattgaagtcacagtgttgaacattccctttcacagagcaggtttgaaacactctttttgtagtgtctataagtgaacatttggcgtgctttcaggcgtaacgtgaaaaaggaaatatcttcccataaaaactagacagaagcattctcagaaacttgttcttgatgtgtcccctctactgagagagttgaacctttctttgcaaagagcagctttgaaacactctttttgtagaatctgcaagaggatatttggatagcttggaggatttcgttggaaacgggtatgtcttcagataaactctagacagaagcattctcagaaacttctttgggatgttgcattcaagtcacagagtagaacattcccattcatagagcagatttgaaacactctttttgtagtatctggaagtggacatttggagcgctttcaggcctatgttgaaaaaggaaatatcttcccataaaaactagacggaagcattctcagaaacttatttgtgatgtgtttgctcaactaacaggattgaaccatcgttttgaaggagcagttttgaaacactgttttcgtggaatctgcaagtggatatttggctagctttgaggatttcgttggaaacgggattacatataaaaaggagacagcagcattctcagaaacttctttgtgatgtctgcattcaattcacagagttgggcattccctttcatagagcaggttggaaacactctttttgtagtatctggatgaggacatttggagcgctttcaggcgtatggtgaaaaaggaaatatcttcccgtaaaaactagacagaagcattctcagaagtttatttgtgatgtgtgccctcaactaacagagttgaacctttcttttgatagagcagttttgaaacactctttttgtaaaatctgcaagaggatatttggatagctttgaggatttcgttgcaaacgggaatggcttcatataaactctagacagaagcattctcagaaacttcgttgggatgtttcgattgaagtcccagtgttgaacattcccttttatagagcaggttggaaacactctttctgcattccctggaagtggacatttggagcgctttcaggacgacggtgaaaatggaaatatcttccaagaaaatctagatagaagcaatgtcagaaacttttatgtgatggatctactcagctaacagagttgaacctttcttttgagagagcagttttgcaacactctttttgtggaatatgcaagtggatatttggctagctgggaggatttcgttggaaacgggattacatacaaaaagcagagagcagcattctcagaaacttctttgtgatgtttgcattcaagtcacagagttgaacattccctttcatagagcaggtttgaaacacgccttttgtcatatctggaagtgtccattcggagcgcattcaggcttgtgttgaaaaaggaaatatcctcccataaaaactagacagaagcattctcagaaacttatctgtgatgtatgtactcaactaacagaactaaaccatcgttttgaaggagcagttttgaaacactctttttgcggaatctgcaagtggatatttggctagctgggaggatttcgttggaaacgggattacatacaaaaagcagagagcagcattctcagaaacttatttgtgatgtgtgccctcaactgacagtgttgaacctttgttttgatagagcagttctgaaacacactttttgtaaaatctgcaagaggatatttggatagctttgaggatttcgttggaaacgggaatgtcttcatgtaaactctggacagaagcattctcagaaactgctttgggatgtttcaattgaagtcccagtgttgaacattcccattcatagagcaggtttgaaacactctttttgtactatctggaagtggacatttggagcgctttcaggtctacggtgaaaaaggagatatcttccaataaaaactagatagaagcaatgtcagaacttttttcatgatgtatctactcagcaaacagagttgaacctttcttttgagagagcagttttgaaacactctttttgtggaatatgcaagtgggtattaggccagcttggaggatttcgttggaaacgggaatacgtataaaaagcagacagcagcattgtcagaaactactttgtgatgtttgcattcaagtcacagaattgaacactccctttcacagagcaggtttgaaacactctttttgtagtgtctgtaagtgaacatatggattgctttcaggcctaaggtgaaaaaggaaatatcttcccataaaaactagacagaagcattctcagaaacttgtttgtgatgtgtgccctctactgacagagttgaacctttctttgcaaagagcagttttgaaacactctttttgtagaatctgcaagaggatatttggatagctttgaggatttcttgggaaacgggaatgtcttcagataaactctagacagaagcattctcagaaacttctttgggatgtttcaattgaagtcacagtgttgaacattccctttcacagagcaggtttgaaacactctttttgtagtgtctataagtgaacatttggcgtgctttcaggcctaacgtgaaaaaggaaatatcttcccataaaaactagacagaagcattctcagaaacttgttcgtgatgtgtgccctctactgacagagttgaacctttctttgcaaagagcagctttgaaacactctttttgtagaatctgcaagaggatatttggatagctttgaggatttcgttggaaacgggaatgtcttcagataaactctagacagaagcattctcagaaacttctttgggatgttgcattcaagtcacagagtagaacattcccattcatagagcagatttgaaacactctttttgtagtatctggaagtggacatttggagcgctttcaggcctatgttgaaaaaggaaatatcttcccataaaaactagacggaagcattctcagaaacttatttgtgatgtgtttgctcaactaacaggattgaaccatcgttttgaaggagcagttttgaaacactgttttcgtggaatctgcaagtggatatttggctagctttgaggatttcgttggaaacgggattacatatacaaaggagacagcagcattctcagaaacttctttgtgatgtctgcattcaattcacagagttgagcattccctttcatagagcaggttggaaacactctttttgtagtatctggatgaggacatttggagcgctttcaggcctatggtgaaaaaggaaatatcttcccgtaaaaactagacagaagcattctcagaagtttatttgtgatgtgtgccctcaactaacagagttgaacctttcttttgatagagcagttttgaaacactctttttgtaaaatctgcaagaggatatttggatagctttgaggatttcgttgcaaacgggaatggcttcatataaactctagacagaagcattctcagaaacttcgttgggatgtttcgattgaagtcccagtgttgaacattcccttttatagagcaggttggaaacactctttctgcattccctggaagtggacatttggagcgctttcaggacaacggtgaaaatggaaatatcttccaagaaaatctagatagaagcaacgtcagaaacttttatgtgatggatctactcagctaacagagttgaacctttcttttgagagagcagttttgcaacactctttttggggaatatgcaagtggatattagggcagctttgaggatttcgttggaaacgggaatacatgtaaaaagcagacagcagcattctcagaaacttctttgtgatgtttgcattgaagtcacagagttgaacatcccctttgagagagcaggtttgaaacacgccttttgtcatatctggaagtgtccattcggagcgcattcaggcttgtgttgaaaaaggaaatatcctcccataaaaactagacagaagcattctcagaaacttatctgtgatgtatgtactcaactaacagaactaaaccatcgttttgaagggcagtttagaaacactctttttgcggaatctgcaagtggatatttggctagctgggaggatttcgttggaaacgggattacatacaaaaagcagacagcagcattctcagaaacttatttgtgatatgtgccctcaactgacagtgttgaacctttgttttgatagagcagttctgaaacacactttttgtaaaatctgcaagaggatatttggatagctttgaggatttcgttggaaacgggaatgtcttcatgtaaactctacacagaagcattctcagaaactgctttgggatgtttcaattgaagtcccagtgttgaacattccctttaatagagcaggtttgaaacactctttttgtactatctggaagtggacatttggagcgctttcaggtctacggtgaaaaaggatatatcttccaataaaaactagatagaagcaatgtcagaacttttttcatgatgtatctactcagcaaacagagttgaacctttcttttgagagagcagttttgaaacactctttttgtggaatatgcaagtgggtattaggccagcttggaggatttcgttggaaacgggaatacgtataaaaagcagacagcagcattgtcagaaactactttgtgatgtttgcattcaagtcacagaattgaacactccctttcacagagcaggtttgaaacactctttttgtagtgtctgtaagtgaacatttggattgctttcaggcctaaggtgaaaaaggaaatatcttcccataaaaactagacagaagcattctcagaaacttgtttgtgatgtgtgccctctactgacagagttgaacctttctttgcaaagagcagttttgaaacactttttgtagaatctgcaagaggatatttggatagctttgaggatttcttgggaaacgggaatgtcttcagataaactctagacagaagcattctcagaaacttctttgggatgtttcaattgaagtcacagtgttgaacattccctttcacagagcaggtttgaaacactctttttgtagtgtctataattgaacatttggcgtgctttcaggcctaacgtgaaaaaggaaatatcttcccataaaaactagacagaagcattctcagaaacttgttcgtgatgtgtgccctctactgacagagttgaacctttctttgcaaagagcagctttgaaacactctttttgtagaatctgcaagaggatatgtggatagcttggaggatttcgttggaaacgggtatgtcttcagataaactctagacagaagcattctcagaaagttctttgggatgtttcaattgaagtcacagtgttgaacattccctttcacagagcaggtttgaaacactctttttgtagtgtctataagtgaacatttggcgtgctttcaggcctaacgtgaaaaaggaaatatcttcccataaaaactagacagaagcattctcagaaacttgttcatgatgtgtgccctctactgacagagttgaacctttctttgcaaagagcagctttgaaacacactttttgtagaatctgcaagaggatatttggatagctttgaggatttcgttggaaacgggtatgtcttcagataaactctagacagaagcattctcagaaacttctttgggatgttgcattcaagtcacagagtagaacattcccattcatagagcagatttgaaacactctttttgtagtatctggaagtggacatttggagcgctttcaggcctatgttgaaaaaggaaatatcttcccataaaaactagacggaagcattctcagaaacttacttgtgatgtgtttgctcaactaacagaattgaaccatcgttttgaaggagcagtttcgaaacactgttttcgtggaatctgcaagtggatatttggctagctttgaggatttcgttggaaacgggattacatataaaaaggagacagcagcattctcagaaacttctttgtgatgtctgcattcaagtcacagagttgagcattccctttcatagagcaggttggaaacactctttttgtagtatctggatgaggacatttggagcgctttcaggcgtatggtgaaaaaggaaatatcttcccgtaaaaactagacagaagattctcagaaatttatttgtgatgtgtgccctcaactaacagagttgaacctttcttttgatagagcagttttgaaacactctttttgtaaaatctgcaagaggatatttggatagctttgaggatttcgttgcaaacgggaatggcttcatataaactctagacagaagcattctcagaaacttcgttgggatgtttcgattgaagtcccagtgttgaacattcccttttatagagcaggttggaaacactctttctgcattccctggaagtggacatttggagcgctttcaggacgacggtgaaaatggaaatatcttccaagaaaatctagatagaagcaatgtcagaaacttttatgtgatggatctactcagctaacagagttgaacctttcttttgagagagcagttttgcaacactctttttgtggaatatgcaagtggatattagggcagctttgaggatttcgttggaaacgggaatacatgtaaaaagcagacagcagcattctcagaaacttctttgtgatgtttgcattgaagtcacagagttgaacattccctttgagagagcaggtttgaaacacgccttttgtcatatctggaagtgtccattcggagcgcattcaggcttgtgttgaaaaaggaaatatcctcccataaaaactagacagaagcattctcagaaacttatctgtgatgtatgtactcaactaacagaactaaaccatcgttttgaaggagcagttttgaaacactctttttgcggaatctgcaagtggatatttggctagctgggaggatttcgttggaaacgggattacatacaaaaagcagacagcagcattctcagaaacttctttgtgatgtttgcattcaagtcacagagttgaacattccctttcatagagcaggtttgaaacactctttttgtagtatctggatgtggacatttggatcgctttcaggcctatggtgaaaaaggaaatatcttcccatgaaaactagacagaagcattctcagaaacttatttgtgatgtgtgccctcaactgacagtgttgaacctttgttttgatagagcagttctgaaacacactttttgtaaaatctgcaagaggatatttggatagctttgaggatttcgttggaaacgggaatgtcttcatgtaaactctagacagaagcattctcagaaactgctttgggatgtttcaattgaagtcccagtgttgaacattccctttcatagagcaggtttgaaacactctttttgtactatctggaagtggacatttggagcgctttcaggtctacggtgaaaaaggagatatcttccaataaaaactagatagaagcaatgtcagaacttttttcatgatgtatctactcagcaaacagagttgaacctttcttttgagagagcagttttgaaacactctttttgtggaatatgcaagtgggtattaggccagcttggaggatttcgttggaaacgggaatacgtataaaaagcagacagcagcattgtcagaaactactttgtgatgtttgcattcaagtcacagaattgaacactccctttcacagagcaggtttgaaacactctttttgtagtgtctgtaagtgtacatttggattgctttcaggcctaaggtgaaaaaggaaatatcttcccataaaaactagacagaagcattctcagaagcttgtttgtgatgtgtgccctctactgacagagttgaacctttctttgcaaagggcagttttgaaacactctttttgtagaatctgcaagaggatatttggatagctttgaggatttcttgggaaacgggaatgtcttcagataaactctagacagaagcattctcagaaacttctttgggatgtttcaattgaagtcacagtgttgaacattccctttcacagagcaggtttgaaacactctttttgtagtgtctataagtgaacatttggcgtgctttcaggcgtaacgtgaaaaaggaaatatcttcccataaaaaccagacagaagcattctcagaaacttgttcttgatgtgtcccctctactgacagagttgaacctttctttgcaaagagcagctttgaaacactctttttgtagaatctgcaagaggatatttggatagctttgaggatttcgttggaaacgggtatgtcttcagataaactctagacagaagcattctcagaaacttctttgggatgttgcattcaagtcacagagtagaacattcccattcatagagcagatttgaaacactctttttgtagtatctggaagtggacatttggagcgctttcaggcctatgttgaaaaaggaaatatcttcccataaaaactagacggaagcattctcagaaacttactcgtgatgtgtttgctcaactaacaggattgaaccatcgttttgaaggagcagttttgaaacactgttttcgtggaatctgcaagtggatatttggctagctttgaggatttcgttggaaacgggattacatataaaaaggagacagcagcattctcagaaacttctttgtgatgtctgcattcaagtcacagagttgagcattccctttcatagagcaggttggaaacactctttttgtagtatctggatgaggacatttggagcgctttcaggcgtatggtgaaaaaggaaatatcttcccgtaaaaactagacagaagcattctcagaagtttatttgtgatgtgtgccctcaactaacagagttgaacctttcttttgatagagcagttttgaaacactctttttgtaaaatctgcaggaggatatttggatagctttgaggatttcgttgcaaacgggaatggcttcatataaactctagacagaagcattctcagaaacttcgttgggatgtttcgattgaagtcccagtgttgaacattcccttttatagagcaggttggaaacactctttctgcattccctggaagtggacatttggagcgctttcaggacgacggtgaaaatggaaatatcttccaagaaaatctagatagaagcaacgtcagaaacttttatgtgatggatctactcagctaacagagttgaacctttcttttgagagagcagttttgcaacactctttttgtggaatatgcaagtggatattagggcagctttgaggatttcgttggaaacgggaatacatgtaaaaagcagacagcaagcattctcagaaacttctttgtgatgtttgcattgaagtcacagagttgaacattccctttgagagagcaggtttgaaacacgccttttgtcatatctggaagtgtccattcggagcgcattcagggttgtgttgaaaaaggaaatatcctcccataaaaactagacagaagcattctcagaaacttatctgtgatgtatgtactcaactaacagaactaaaccatcgttttgaaggagcagtttcgaaacactcattttgcggaatctgcaagtggatatttggctagctgggaggatttcgttggaaacggcattacatacaaaaagcagacagcagcattctcagaaacttctttgtgatgtttgcattcaagtcacagagttgaacattccctttcatagagcaggtttgaaacactctttttgtagtatctggatgtggacatttggatcgctttcaggcctatggtgaaaaaggaaatatcttcccatgaaaactagacagaagcattctcagaaacttatttgtgatgtgtgccctcaactgacagtgttgaacctttgttttgatagagcagttctgaaacacactttttgtaaaatctgcaagaggatatttggatagctttgaggatttcgttggaaacgggaatgtcttcatgtaaactctacacagaagcattctcagaaactgctttgggatgtttcaattgaagtcccagtgttgaacattccctttcatagagcaggtttgaaacactctttttgtactatctggaagtggacatttggagcgctttcaggtctacggtgaaaaaggagatatcttccaataaaaactagatagaagcaatgtcagaacttttttcatgatgtatctactcagcaaacagagttgaacctttcttttgagagagcagttttgaaacactccttttgtggaatatgcaagtgggtattaggccagcttggaggatttcgttggaaacgggaatacgtataaaaagcagacagcagcattgtcagaaactactttgtgatgtttgcattcaagtcacagaattgaacactccctttcacagagcaggtttgaaactctctttttgtagtgtctgtaagtgaacatttggcgtgctttcaggcgtaacgtgaaaaaggaaatatcttcccataaaaactagacagaagcattctcagaaacttgttcttgatgtgtgccctctactgacagagttgaacctttctttgcaaagagcagttttgaaacactctttttgtagaatctgcaagaggatatttggatagctttgaggatttcttgggaaacgggaatgtcttcagataaactctagacagaagcattctcagaaacttctttgggatgtttcaattgaagtcacagtgttgaacattccctttcacagagcaggtttgaaacactctttttgtagtgtctataagtgaacatttggcgtgctttcaggcctaacgtgaaaaaggaaatatcttcccataaaaactagacagaagcattctcagaaacttgttcgtgatgtgtcccctctactgacagagttgaacctttctttgcaaagagcagctttgaaacacactttttgtagaatctgcaagaggatatttggatagctttgaggatttcgttggaaacgggtatgtcttcagataaactctagacagaagcattctcagaaacttctttgggatgttgcattcaagtcacagagtagaacattcccattcatagagcagatttgaaacactctttttgtagtatctggaagtggacatttggagcgctttcaggcctatgttgaaaaaggaaatatcttcccataaaaactagacggaagcattctcagaaacttatttgtgatgtgtttgctcaactaacaggattgaaccatcgttttgaaggagcagttttgaaacactgttttcgtggaatctgcaagtggatatttggctagctttgaggatttcgttggaaacgggattacatataaaaaggagacagcagcattctcagaaacttctttgtgatgtctgcattcaattcacagagttgagcattccctttcatagagcaggttggaaacactctttttgtagtatctggatgaggacatttggagcgctttcaggcctatggtgaaaaaggaaatatcttcccgtaaaaactagacagaagcattctcagaagtttatttgtgatgtgtgccctcaactaacagagttgaacctttcttttgatagagcagttttgaaacactctttttgtaaaatctgcaagaggatatttggatagctttgaggatttcgttgcaaacgggaatggcttcatataaactctagacagaagcattctcagaaacttcgttgggatgtttcgattgaagtcccagtgttgaacattcccttttatagagcaggttggaaacactctttctgcattccctggaagtggacatttggagcgctttcaggacgacggtgaaaatggaaatatcttccaagaaaatctagatagaagcaatgtcagaaacttttatgtgatggatctactcagctaacagagttgaacctttcttttgagagagcagttttgcaacactctttttgtggaatatgcaagtggatattagggcagctttgaggatttcgttggaaacgggaatacatgtaaaaagcagacagcagcattctcagaaacttctttgtgatgtttgcattgaagtcacagagttgaacattccctttgagagagcaggtttgaaacacgccttttgtcatatctggaagtgtccattcggagcgcattcaggcttgtgttgaaaaaggaaatatcctcccataaaaactagacagaagcattctcagaaacttatctgtgatgtatgtactcaactaacagaactaaaccatcgttttgaaagagcagttttgaaacactctttttgcggaatctgcaagtggatatttggctagctgggaggatttcgttggaaacgggattacatacaaaaagcagacagcagcattctcagaaacttctttgtgatgtttgcattcaagtcacagagttgaacattccctttcatagagcaggtttgaaacactctttttgtagtatctggatgtggacatttggatcgctttcaggcctatggtgaaaaaggaaatatcttcccatgaaaactagacagaagcattctcagaaacttatttgtgatgtgtgccctcaactgacagtgttgaacctttgttttgatagagcagttctgaaacacactttttgtaaaatctgcaagaggatatttggatagctttgaggatttcgttggaaacgggaatgtcttcatgtaaactctagacagaagcattctcagaaactgctttgggatgtttcaattgaagtcccagtgttgaacattcccattcatagagcaggtttgaaacactctttttgtactatctggaagtggacatttggagcgctttcaggtctacggtgaaaaaggagatatcttccaataaaaactagatagaagcaatgtcagaacttttttcatgatgtatctactcagcaaacagagttgaacctttcttttgagggagcagttttgaaacactatttttgtggaatatgcaagtgggtattaggccagcttggaggatttcgttggaaacgggaatacgtataaaaagcagacagcagcattgtcagaaactactttgtgatgtttgcattcaagtcacagaattgaacactccctttcacagagcaggtttgaaacactctttttgtagtgtctgtaagtgaacatatggattgctttcaggcctaaggtgaaaaaggaaatatcttcccataaaaactagacagaagcattctcagaaacttgtttgtgatgtgtgccctctactgacagagttgaacctttctttgcaaagagcagttttgaaacactctttttgtagaatctgcaagaggatatttggatagctttgaggatttcttgggaaacgggaatgtcttcagataaactctagacagaagcattctcagaaacttctttgggatatttcaattgaagtcacagtgttgaacattccctttcacagagcaggtttgaaacactctttttgtagtgtctataagtgaacatttggcgtgctttcaggcgtaacgtgaaaaaggaaatatcttcccataaaaacgagacagaagcattctcagaaacttgttcatgatgtgtgccctctactgacagagttgaacctttctttgcaaagagcagctttgaaacactctttttgtagaatctgcaagaggatatttggatagcttggaggatttcgttggaaacgggtatgtcttcagataaactctagacagaagcattctcagaaacttctttgggatgtttcaattgaagtcacagtgttgaacattccctttcacagagcaggtttgaaacactctttttgtagtgtctataagtgaacatttggcgtgctttcaggcgtaacgtgaaaaaggaaatatcttcccataaaaaccagacagaagcattctcagaaacttgttcgtgatgtgtgccctctactgacagagttgaacctttctttgcaaagagcagctttgaaacacactttttgtagaatctgcaagaggatatttggatagcttggaggatttcgttggaaacgggtatgtcttcagataaactctagacagaagcattctcagaaacttctttgggatgttgcattcaagtcacagagtagaacattcccattcatagagcagatttgaaacactctttttgtagtatctggaagtggacatttggagcgctttcaggcctatgttgaaaaaggaaatatcttcccataaaaactagacggaagcattctcagaaacttatttgtgatgtgtttgctcaactaacaggattgaaccatcgttttgaaggagcagttttgaaacactgttttcgtggaatctgcaagtggatatttggctagctttgaggatttcgttggaaacgggattacatataaaaaggagacagcagcattctcagaaacttctttgtgatgtctgcattcaagtcacagagttgagcattccctttcatagagaaggttggaaacactctttttgtagtatctggatgaggacatttggagcgctttcaggcgtatggtgaaaaaggaaatatcttcccgtaaaaactagacagaagcattctcagaagtttatttgtgatgtgtgccctcaactaacagagttgaacctttcttttgatagagcagttttgaaacactctttttgtaaaatctgcaagaggatatttggatagctttgaggatttcgttgcaaacgggaatggcttcatataaactctagacagaagcattctcagaaacttcgttgggatgtttcgattgaagtcccagtgttgaacattcccttttatagagcaggttggaaacactctttctgcattccctggaagtggacatttggagcgctttcaggacgacggtgaaaatggaaatatcttccaagaaaatctagatagaagcaatgtcagaaacttttatgtgatggatctactcagctaacagagttgaacctttcttttgagagagcagttttgcaacactctttttgtggaatatgcaagtggatattagggcagctttgaggatttcgttggaaacgggaatacatgtaaaaagcagacagcagcattctcagaaacttctttgtgatgtttgcattgaagtcacagagttgaacattccctttgagagagcaggtttgaaacacgccttttgtcatatctggaagtgtccattcggagcgcattcaggcttgtgttgaaaaaggaaatatcctcccataaaaactagacagaagcattctcagaaacttatctgtgatgtatgtactcaactaacagaactaaaccatcgttttgaaggagcagttttgaaacactctttttgcggaatctgcaagtggatatttggctagctgggaggatttcgttggaaacgggattacatacaaaaagcagacagcagcattctcagaaacttctttgtgatgtttgcattcaagtcacagagttgaacattccctttcatagagcaggtttgaaacactctttttgtagtatctggatgtggacatttggatcgctttcaggcctatggtgaaaaaggaaatatcttcccatgaaaactagacagaagcattctcagaaacttatttgtgatgtgtgccctcaactgacagtgttgaacctttgttttgatagagcagttctgaaacacactttttgtaaaatctgcaagaggatatttggatagctttgaggatttcgttggaaacgggaatgtcttcatgtaaactctacacagaagcattctcagaaactgctttgggatgtttcaattgaagtcccagtgttgaacattcccattcatagagcaggtttgaaacactctttttgtactatctggaagtggacatttggagcgctttcaggtctacggtgaaaaaggagatatcttccaataaaaactagatagaagcaatgtcagaacttttttcatgatgtatctactcagctaacagagttgaacctttcttttgagagagcagttttgaaacactctttttgtggaatatgcaagtgggtattaggccagcttggaggatttcgttggaaacgggaatacgtataaaaagcagacagcagcattgtcagaaactactttgtgatgtttgcattcaagtcacagaattgaacactccctttcacagagcaggtttgaaacactctttttgtagtgtctgtaagtgaacatatggattgctttcaggcctaaggtgaaaaaggaaatatcttcccataaaaactagacagaaagcattctcagaaacttgtttgtgatgtgtgccctctactgacagagttgaacctttctttgcaaagagcagttttgaaacactctttttgtagaatctgcaagaggatatttggatagctttgaagatttcttgggaaacgggaatgtcttcagataaactctagacagaagcattctcagaaacttctttgggatgtttcaattgaagtcacagtgttgaacattccctttcacagagcaggtttgaaacactctttttgtagtgtctataagtgaacatttggcgtgctttcaggcctaacgtgaaaaaggaaatatcttcccataaaaactagacagaagcattctcagaaacttgttcgtgatgtgtgccctctactgacagagttgaacctttctttgcaaagagcagctttgaaacacactttttgtagaatctgcaagaggatatttggatagtgtttgaggatttcgttggaaacgggtatgtcttcagataaactctagacagaagcattctgagaaacttctttgggatgttgcattcaagtcacagagtagaacattcccattcatagagcagatttgaaacactctttttgttgtatctggaagtggacatttggagctctttcaggcctatgttgaaaaaggaaatatcttcccataaaaactagacggaaagcattctcagaaacttacttgtgatgtgtttgctcaactaacagaattgaaccatcgttttgaaggagcagttttgaaacactgttttcgtggaatctgcaagtggatatttggctagctttgaggatttcgttggaaacgggattacatatacaaaggagacagcagcattctcagaaacttctttgtgatgtctgcattcaattcacagagttgagcattccctttcatagagcaggttggaaacactctttttgtagtatctggatgaggacatttggagcgctttcaggcgtatggtgaaaaaggaaatatcttcccgtaaaaactagacagaagcattctcagaagtttatttgtgatgtgtgccctcaactaacagagttgaaactttcttttgatagagcagttttgaaacactcattttgtaaaatctgcaagaggatatttggatagctttgaggatttcgttgcaaacgggaatggcttcatataaactctagacagaagcattctcagaaacttcgttgggatgtttcgattgaagtcccagtgttgaacattcccttttatagagcaggttggaaacactctttctgcattccctggaagtggacatttggagcgctttcaggacgacggtgaaaatggaaatatcttccaagaaaatctagatagaagcaatgtcagaaacttttatgtgatggatctactcagctaacagagttgaacctttcttttgagagagcagttttgcaacactctttttgtggaatatgcaagtggatattagggcagctttgaggatttcgttggaaacgggaatacatgtaaaaagcagacagcagcattctcagaaacttctttgtgatgtttgcattgaagtcacagagttgaacattccctttgagagagcaggtttgaaacacgccttttgtcatatctggaagtgtccattcggagcgcattcaggcttgtgttgaaaaaggaaatatcctcccataaaaactagacagaagcattctcagaaacttatctgtgatgtatgtactcaactaacagaactaaaccatcgttttgaaggagcagttttgaaacactctttttgcggaatctgcaagtggatatttggctagctgggaggatttcgttggaaacgggattacatacaaaaagcagacagcagcattctcagaaacttctttgtgatgtttgcattcaagtcacagagttgagcattccctttcatagagcaggttggaaacactctttttgtagtatctggatgtggacatttggatcgctttctggcgtatggtgaaaaaggaaatatcttcccatgaaaactagacagaagcattctcagaaatttatttgtgatgtttgccctcaactaaccgagttgaacctttcttttgatagagcagttttgaaacactctttttgtaaaatctgcaagaggatatttggatagctttgaggatttcgttgcaaacgggaatggcttcatataaactctagacagaagcattctcagaaacttcgttgggatgtttcgattgaagtcccagtgttgaacattcccttttatagagcaggttggaaacactctttctgcattccctggaagtggacatttggagcgctttcaggacgacggtgaaaatggaaatatcttccaagaaaatctagatagaagcaatgtcagaaacttttctgtgatggatctactcagctaacagagttgaagctttcttttgagagagcagttttgcaacactctttttgtggaatatgcaagtggatattagggcagctttgaggatttcgttggaaacgggaatacatgtaaaaagcagacagcagcattctcagaaacttctttgtgatgtttgcattgaagtcacagagttgaacattccctttgagagagcaggtttgaaacacgccttttgtcatatctggaagtgtccattcggagcgcattcaggcttgtgttgaaaaaggaaatatcctcccataaaaactagacagaagcattctcagaaacttgtctgtgatgtatgtactcaactaacagaactaaaccatcgttttgaaggagcagttttgaaacactctttttgcggaatctgcaagtggatatttggctagctgggaggatttcgttggaaacgggattacatacaaaaagcagacagcagcattctcagaaacttctttgtgatgtttgcattcaagtcacagagttgaacattccctttcatagagcaggtttgaaacactctttttgtagtatctggatgtggacatttggatcgctttcaggcctatggtgaaaaaggaaatatcttcccatgaaaactagacagaagcattctcagaaacttatttgtgatgtgtgccctcaactgacagtgttgaacctttgttttgatagagcagttctgaaacacactttttgtaaaatctgcaagaggatatttggatagctttgaggatttcgttggaaacgggaatgtcttcatgtaaactctacacagaagcattctcagaaactgctttgggatgtttcaattgaagtcccagtgttgaacattcccattcatagagcaggtttgaaacactctttttgtactatctggaagtggacatttggagcgctttcaggtctacggtgaaaaaggagatatcttccaataaaaactagatagaagcaatgtcagaacttttttcatgatgtatctactcagcacacagagttgaacctttcttttgagagagcagttttgaaacactctttttgtggaatatgcaagtgggtattaggccagcttggaggatttcgttggaaacgggaatacgtataaaaagcagacagcagcattgtcagaaactactttgtgatgtttgcattcaagtcacagaattgaacactccctttcacagagcaggtttgaaacactctttttgtagtgtctgtaagtgaacatatggattgctttcaggcctaaggtgaaaaaggaaatatcttgcccataaaaactagacagaagcattctcagaaacttgtttgtgatgtgtgccctctactgacagagttgaacctttctttgcaaagagcagttttgaaacactctttttgtagaatctgcaagaggatatttggatagctttgaggatttcttgggaaacgggaatgtcttcagataaactctagacagaagcattctcagaaacttctttgggatgtttcaattgaagtcacagtgttgaacattccctttcacagagtaggtttgaaacactctttttgtagtgtctataagtgaacatttggcgtgctttcaggcctaacgtgaaaaaggaaatatcttcccataaaaactagacagaagcattctcagaaacttgttcatgatgtgtgccctctactgacagagttgaacctttctttgcaaagagcagctttgaaacactctttttgtagaatctgcaagaggatatttggatagctttgaggatttcgttggaaacgggtatgtcttcagataaactctagacagaagcattctcagaaacttctttgggatgttgcattcaagtcacagagtagaacattcccattcatagagcagatttgaaacactctttttgtagtatctggaagtggacatttggagcgctttcaggcctatgttgaaaaaggaaatatcttcccataaaaactagacggaagcattctcagaaacttatttgtgatgtgtttgctcaactaacaggattgaaccatcgttttgaaggagcagttttgaaacactgttttcgtggaatctgcaagtggatatttggctagctttgaggatttcgttggaaacgggattacatataaaaaggagacagcagcattctcagaaacttctttgtgatgtctgcattcaagtcacagagttgagcattccctttcatagagcaggttggaaacaccctttttgtagtatctggatgaggacatttggagcgctttcaggcgtatggtgaaaaaggaaatatcttcccgtaaaaactagacagaagcattctcagaagtttatttgtgatgtgtgccctcaactaacagagttgaacctttcttttgatagagcagttttgaaacactctttttgtaaaatctgcaagaggatatttggatagctttgaggatttcgttgcaaacgggaatggcttcatataaactctagacagaagcattctcagaaacttcgttgggatgtttcgattgaagtcccagtgttgaacattcccttttatagagcaggttggaaacactctttctgcattccctggaagtggacatttggagcgctttcaggacgacggtgaaaatggaaatatcttccaagaaaatctagatagaagcaacgtcagaaacttttatgtgatggatctactcagctaacagagttgaacctttcttttgagagagcagttttgcaacactctttttgtggaatatgcaagtggatattagggcagctttgaggatttcgttggaaacgggaatacatgtaaaaagcagacagcaagcattctcagaaacttctttgtgatgtttgcattgaagtcacagagttgaacattccctttgagagagcaggtttgaaacacgccttttgtcatatctggaagtgtccattcggagcgcattcaggcttgtgttgaaaaaggaaatatcctcccataaaaactagacagaagcattctcagaaacttatctgtgatgtatgtactcaactaacagaactaaaccatcgttttgaaggagcagttttgaaacactctttttgcggaatctgcaagtggatatttggctagctgggaggatttcgttggaaacgggattacatacaaaaagcagacagcagcattctcagaaacttctttgtgatgtttgcattcaagtcacagagttgaacattccctttcatagagcaggtttgaaacactctttttgtagtatctggatgtggacatttggatcgctttcaggcctatggtgaaaaaggaaatatcttcccatgaaaactagacagaagcattctcagaaacttatttgtgatgtgtgccctcaactgacagtgttgaacctttgttttgatagagcagttctgaaacacactttttgtaaaatctgcaagaggatatttggatagctttgaggatttcgttggaaacgggaatgtcttcatgtaaactctagacagaagcattctcagaaactgctttgggatgtttcaattgaagtcccagtgttgaacattccctttcatagagcaggtttgaaacactctttttgtactatctggaagtggacatttggagcgctttcaggtctacggtgaaaaaggagatatcttccaataaaaactagatagaagcaatgtcagaacttttttcatgatgtatctactcagcaaacagagttgaacctttcttttgagagagcagttttgaaacactctttttgtggaatatgcaagtgggtattaggccagcttgaaggatttcgttggaaacgggattacgtataaaaagcagacagcagcattgtcagaaactactttgtgatgtttgcattcaagtcacagaattgaacactccctttcacagagcaggtttgaaacactctttttgtagtgtctggaagtgaacatttggattgctttcaggcctaaggtgaaaaaggaaatatcttcccataaaaactagacagaagcattctcagaaacttgtttgtgatgtgtgccctctactgacagagttgaacctttctttgcaaagagcagttttgaaacactctttttgtagaatctgcaagaggatatttggatagctttgaggatttcttgggaaacgggaatgtcttcagataaactctagacagaagcattctcagaaacttctttgggatgtttcaattgaagtcacagtgttgaacattccctttcacagagcaggtttgaaacactctttttgtagtgtctataagtgaacatttggcgtgctttcaggcctaacgtgaaaaaggaaatatcttcccataaaaactagcacagaagcattctcagaaacttgttcgtgatgtgtgccctctactgacagagttgaacctttctttgcaaagagcagctttgaaacactctttttgtagaatctgcaagaggatatttggatagctttgaggatttcgttggaaacgggtatgtcttcagataaactctagacagaagaattctcagaaacttctttgggatgttgcattcaagtcacagagtagaacattcccattcatagagcagatttgaaacactctttttgtagtatctggaagtggacatttggagcgctttcaggcctatgttgaaaaaggatatatcttcccataaaaactagacggaagcattctcagaaacttatttgtgatgtgtttgctcaactaacaggattgaaccatcgttttgaaggagcagttttgaaacactgttttcgtggaatctgcaagtggatatttggctagctttgaggatttcgttggaaacgggattacatataaaaaggagacagcagcattctcagaaacttctttgtgatgtctgcattcaattcacagagttgagcattccctttcctagagcacgttggaaacactctttttgtagtatctggatgaggacatttggagcgctttcaggcgtatggtgaaaaaggaaatatcttcccgtaaaaactagacagaagcattctcagaagtttatttgtgatgtgtgccctcaactaacagagttgaacctttcttttgatagagcagttttgaaacactctttttgtaaaatctgcaagaggatatttggatagctttgaggatttcgttgcaaacgggaatggcttcatataaactctagacagaagcattctcagaaacttcgttgggatgtttcgattgaagtcccagtgttgaacattcccttttatagagcaggttggaaacactctttctgcattccctggaagtggacatttggagcgctttcaggacgacggtgaaaatggaaatatcttccaagaaaatctagatagaagcaatgtcagaaacttttatgtgatggatctactcagctaacagagttgaacctttcttttgagagagcagttttgcaacactctttttgtggaatatgcaagtggatattagggcagctttgaggatttcgttggaaacgggaatacatgtaaaaagcagacagcagcattctcagaaacttctttgtgatgtttgcattgaagtcacagagttgaacattccctttgagagagcaggtttgaaacacgccttttgtcatatctggaagtgtccattcggagcgcattcaggcttgtgttgaaaaaggaaatatcctcccataaaaactagacagaagcattctcagaaacttatctgtgatgtatgtactcaactaacagaactaaaccatcgttttgaaggagcagttttgaaacactctttttgcggaatctgcaagtggatatttggctagctgggaggatttcgttggaaacgggattacatacaaaaagcagacagcagcattctcagaaacttctttgtgatgtttgcattcaagtcacagagttgaacattccctttcatagagcaggtttgaaacactctttttgtagtatctggatgtggacatttggatcgctttcaggcctatggtgaaaaaggaaatatcttcccatgaaaactagacagaagcattctcagaaacttattggtgatgtgtgccctcaactgacagtgttgaacctttgttttgatagagcagttctgaaacacactttttgtaaaatctgcaagaggatatttggatagctttgaggatttcgttggaaacgggaatgtcttcatgtaaactctagacagaagcattctcagaaactgctttgggatgtttcaattgaagtcccagtgttgaacattcccattcatagagcaggtttgaaacactctttttgtagtgtctgtaagtgaacatttggattgctttcaggcctaaggtgaaaaaggaaatatcttcccataaaaactagacagaagcattctcagaaacttgttcgtgatgtgtgccctctactgacagagttgaacctttctttgcaaagagcagctttgaaacacactttttgtagaatctgcaagaggatatttggaaagctttgaggatttcgttggaaacgggtatgtcttcagataaactctagacagaagcattctcagaaaattctttgggatgttgcattcaagtcacagagtagaacattcccattcatagagcagatttgaaacactctttttgtagtatctggaagtggacatttggagcgctttcaggcctatgttgaaaaaggaaatatcttcccataaaaactagacggaaagcattctcagcaaacttacttgtgatgtgtttgctcaactaacagaattgaaccatcgttttgaaggagcagttttgaaacactgttttcgtggaatctgcaagtggatatttggctagctttgaggatttcgttggaaacgggattacatataaaaaggagacagcagcattctcagaaacttctttgtgatgtctgcattcaattcacagagttgagcattccctttcatagagcaggttggaaacactctttttgtagtatctggatgaggacatttggagcgctttcaggcgtatggtgaaaaaggaaatatcttcccgtaaaaactagacagaagcattctcagaagtttatttgtgatgtgtgccctcaactaacagagttgaacctttcttttgatagagcagttttgaaacactctttttgtaaaatctgcaagaggatatttggatagctttgaggatttcgttgcaaacgggaatggcttcatataaactctagacagaagcattctcagaaacttcgttgggatgtttcgattgaagtcccagtgttgaacattcccttttatagagcaggttggaaacactctttctgcattccctggaagtggacatttggagcgctttcaggacgacggtgaaaatggaaatatcttccaataaaatctagatagaagcaatgtcagaaacttttatgtgatggatctactcagctaacagagttgaacctttcttttgagagagcagttttgcaacactctttttgtggaatatgcaagtggatattagggcagctttgaggatttcgttggaaacgggaatacatgtaaaaagcagacagcagcattctcagaaacttctttgtgatgtttgcattgaagtcacagagttgaacattccctttgagagagcaggtttgaaacacgccttttgtcatatctggaagtgtccattcggagcgcattcaggcttgtgttgaaaaaggaaatatcctcccataaaaactagacagaagcattctcagaaacttatctgtgatgtatgtactcaactaacagaactaaaccatcgttttgaaggagcagttttgaaacactctttttgcggaatctgcaagtggatatttggctagctgggaggatttcgttggaaacgggattacatgcaaaaagcagagagcagcattctcagaaaacttctttgtgatgtttgcattcaagtcacagagttgaacattccctttcatagagcaggtttgaaacactctttttgtagtatctggatgtggacatttggatcgctttcaggcctatggtgaaaaaggaaatatcttcccatgaaaactagacagaagcattctcagaaacttatttgtgatgtgtgccctcaactgacagtgttgaacctttgttttgatagagcagttctgaaacacactttttgtaaaatctgcaagaggatatttggatagctttgaggatttcgttggaaacgggaatgtcttcatgtaaactctagacagaagcattctcagaaactgctttgggatgtttcaattgaagtcccagtgttgaacattccctttcataggagcaggtttgaaacactctttttgtactatctggaagtggacatttggagcgctttcaggtctacggtgaaaaaggagatatcttccaataaaaactagatagaagcaatgtcagaacttttttcatgatgtatctactcagcaaacagagttgaacctttcttttgagagagcagttttgaaacactctttttatggaatatgcaagtgggtattaggccagcttggaggatttcgttggaaacgggaatacgtataaaaagcagacagcagcattgtcagaaactactttgtgatgtttgcattcaagtcacagaattgaacactccctttcacagggcaggtttgaaacactctttttgtagtgtctgtaagtgaacatttggattgctttcaggcctaaggtgaaaaaggaaatatcttcccataaaaactagacagaagcattctcagaaacttgtttgtgatgtgtgccctctactgacagagttgaaactttctttgcaaagagcagttttgaaacactctttttgtagaatctgcaagaggatatttggatagctttgaggatttcttgggaaacgggaatgtcttcagataaactctagacagaagcattctcagaaacttcttcgggatgtttcaattgaagtcagtgttgaacattccctttcacagagcaggtttgaaacactctttttgtagtgtctataagtgaacatttggcgtgctttcaggcgtaacgtgaaaaaggaaatatcttcccataaaaactagacagaagcattctcagaaacttgttcttgatgtgtcccctctactgacagagttgtacctttctttgcaaagagcagctttgaaacactctttttgtagaatctgcaagaggatatttggatagcttggaggatttcgttggaaacgggtatgtcttcagataaactctagacagaagcattctcagaaacttctttgggttgttgcattcaagtcacagagtagaacattcccattcatagagcagatttgaaacactccttttgtagtatctggaagtggacatttggagcgctttcaggcctatgttgaaaaaggaaatatcttcccataaaaactagacggaagcattctcagaaacttatttgtgatgtgtttgctcaactaacaggattgaaccatcgttttgaaggagcagttttgaaacactgttttcgtggaatctgcaagtggatatttggctagctttgaggatttcgttggaaacgggattacatataaaaaggagacagcagcattctcagaaacttctttgtgatgtctgcattcaattcacagagttgagcattccctttcatagagcaggttggaaacactctttttgtagtatctggatgaggacatttggagcgctttcaggcgtatggtgaaaaaggaaatatcttcccgtaaaaactagacagaagcattctcagaagtttatttgtgatgtgtgccctcaactaacagagttgaacctttcttttgatagagcagttttgaaacactctttttgtaaaatctgcaagaggatatttggatagctttgaggatttcgttgcaaacgggaatggcttcatataaactctagacagaagcattctcagaaacttcgttgggatgtttcgattgaagtcccagtgttgaacattcccttttatagagcaggttggaaacactctttctgcattccctggaagtggacatttggagcgctttcaggacgacggtgaaaatggaaatatcttccaagcaaaatctagatagaagcaacgtcagaaacttttctgtgatggatctactcagctaacagagttgaacctttcttttgagagagcagttttgcaacactctttttgtggaatatgcaagtggatattagggcagctttgaggatttcgttggaaacgggaatacatgtaaaaagcagacagcagcattctcagaaacttctttgtgatgtttgcattgaagtcacagagttgaacattccctttgagagagcaggtttgaaacacgccttttgtcatatctggaagtgtccattcggagcgcattcaggcttgtgttgaaaaaggaaatatcctcccataaaaactagacagaagcattctcagaaacttatctgtgatgtatgtactcaactaacagaactaaaccatcgttttgaaggagcagttttgaaacactctttttgcggaatctgcaagtggatatttggctagctgggaggatttcgttggaaacgggattacatacaaaaagcagacagcagcattctcagaaacttctttgtgatgtttgcattcaagtcacagagttgaacattccctttcatagagcaggtttgaaacactctttttgtagtatctggatgtggacatttggatcgctttcaggcctatggtgaaaaaggaaatatcttcccatgaaaactagacagaagcattctcagaaacttatttgtgatgtgtgccctcaactgacagtgttgaacctttgttttgatagagcagttctgaaacacactttttgtaaaatctgcaagaggatatttggatagctttgaggatttcgttggaaacgggaatgtcttcatgtaaactctacacagaagcattctcagaaactgctttgggatgtttcaattgaagtcccagtgttgaacattcccattcatagagcaggtttgaaacactctttttgtactatctggaagtggacatttggagcgctttcaggtctacggtgaaaaaggagatatcttccaataaaaactagatagaagcaatgtcagaacttttttcatgatgtatctactcagctaacagagttgaacctttcttttgagagagcagttttgaaacactctttttgtggaatatgcaagtgggtattaggccagcttggaggatttcgttggaaacgggaatacgtataaaaagcagacagcagcattgtcagaaactactttgtgatgtttgcattcaagtcacagaattgaacactccctttcacagagcaggtttgaaacactctttttgtagtgtctataagtgaacatttggcgtgctttcaggcctaaggtgaaaaaggaaatatcttcccataaaaactagacagaagcattctcagaaacttgttcgtgatgtgtgccctctactgacagagttgaacctttctttgcaaagagcagctttgaaacactctttttgtagaatctgcaagaggatatttggatagctttgaggatttcgttggaaacgggtatgtcttcagataaactctagacagaagcattctcagaaacttctttgggatgttgcattcaagtcacagagtagaacattcccattcatagagcagatttgaaacactctttttgtagtatctggaagtggacatttggagcgctttcaggcctatgttgaaacaggaaatatcttcccataaaaactagacggaagcattctcagaaacttacttgtgatgtgtttgctcaactaacagaattgaaccatcgttttgaaggagcagttttgaaacactgttttcgtggaatctgcaagtggatatttggctagctttgaggatttcgttggaaacgggattacatataaaaaggagacagcagcattctcagaaacttctttgtgatgtctgcattcaagtcacagagttgagcattccctttcatagagcaggttggaaacactctttttgtagtatctggatgaggacatttggagcgctttcaggcctatggtgaaaaaggaaatatcttcccgtaaaaactagacagaagcattctcagaaatttatttgtgatgtgtgccctcaactaacagagttgaacctttcttttgatagagcagttttgaaacactctttttgtaaaatctgcaagaggatatttggatagctttgaggatttcattgcaaacgggaatggcttcatataaactctagacagaagcattctcagaaacttcgttgggatgtttcgattgaagtcccagtgttgaacattcccttttatagagcaggttggaaacactctttctgcattccctggaagtggacatttggagcgctttcaggacgacggtgaaaatggaaatatcttccaagaaaatctagatagaagcaacgtcagaaacttttctgtgatggatctactcagctaacagagttgaacctttcttttgagagagcagttttgcaacactctttttgtggaatatgcaagtggatattagggcagctttgaggatttcgttggaaacgggaatacatgtaaaaagcagacagcagcattctcagaaactgctttgtgatgtttgcattgaagtcacagagttgaacattccctttgagagagcaggtttgaaacacgccttttgtcatatctggaagtgtccattcggagcgcattcaggcttgtgttgaaaaaggaaatatcctcccataaaaactagacagaagcattctcagaaacttatctgtgatgtatgtactcaactaacagaactaaaccatcgttttgaaggagcagttttgaaacactctttttgtggaatctgcaagtggatatttggctagctgggaggatttcgttggaaacgggattacatacaaaaagcagacagcagcattctcagaaacttctttgtgatgtttgcattcaagtcacagagttgaacattccctttcatagagcaggtttgaaacactctttttgtagtatctggatgtggacatttggatcgctttcaggcctatggtgaaaaaggaaatatcttcccatgaaaactagacagaagcattctcagaaacttatttgtgatgtgtgccctcaactgacagtgttgaacctttgttttgatagagcagttctgaaacacactttttgtaaaatctgcaagaggatatttggatagctttgaggatttcgttggaaacgggaatgtcttcatgtaaactctagacagaagcattctcagaaactgctttgggatgtttcaattgaagtcccagtgttgaacattccctttcatagagcaggtttgaaaccctctttttgtactatctggaagtggacatttggagcgctttcaggtctacggtgaaaaaggagatatcttccaataaaaactagatagaagcaatgtcagaacttttttcatgatgtatctactcagcaaacagagttgaacctttcttttgagggagcagttttgaaacactatttttgtggaatatgcaagtgggtattaggccagcttggaggatttcgttggaaacgggaatacgtataaaaagcagacagcagcattgtcagaaactactttgtgatgtttgcattcaagtcacagaattgaacactccctttcacagagcaggtttgaaacactctttttgtagtgtctgtaagtgaacatttggattgctttcaggcctaaggtgaaaaaggaaatatcttcccataaaaactagacagaagcattctcagaaacttgtttgtgatgtgtgccctctactgacagagttgaacctttctttgcaaagagcagttttgaaacactctttttgtagaatctgcaagaggatatttggatagctttgaggatttcttgggaaacaggaatgtcttcagataaactctagacagaagcattctcagaaacttctttgggatgtttcaattgaagtcacagtgttgaacattccctttcacagagcaggtttgaaacactctttttgtagtgtctataagtgaacatttggcgtgctttcaggcctaacgtgaaaaaggaaatatcttcccataaaaactagacagaagcattctcagaaacttgttcatgatgtgtgccctctactgacagagttgaacctttctttgcaaagagcagctttgaaacactctttttgtagaatctgcaagaggatatttggatagctttgaggatttcgttggaaacgggtatgtcttcagataaactctagacagaagcattctcagaaacttctttgggatgttgcattcaagtcacagagtagaacattcccattcatagagcagatttgaaacactctttttgtagtatctggaagtggacatttggagcgctttcaggcctatgttgaaaaaggaaatatcttcccataaaaactagacggaagcattctcagaaacttacttgtgatgtgtttgctcaactaacagaattgaaccatcgttttgaaggagcagttttgaaacactgttttcgtggaatctgcgagtggatatttggctagctttgaggatttcgttggaaacgggattacatataaaaaggagacagcagcattctcagaaacttctttgtgatgtctgcattcaagtcacagagttgagcattccctttcatagagcaggttggaaacactctttttgtagtatctggatgaggacatttggagcgctttcaggcctatggtgaaaaaggaaatatcttcccgtaaaaactagacagaagcattctcagaagtttatttgtgatgtgtgccctcaactaacagagttgaacctttcttttgatagagcagttttgaaacactctttttgtaaaatctgcaagaggatatttggatagctttgaggatttcgttgcaaacgggaatggcttcatataaactctagacagaagcattctcagaaacttcgttgggatgtttcgattgaagtcccagtgttgaacattcccttttatagagcaggttggaaacactctttctgcattccctggaagtggacatttggagcgctttcaggacgacggtgaaaatggaaatatcttccaagaaaatctagatagaagcaatgtcagaaacttttatgtgatggatctactcagctaacagagttgaacctttcttttgagagagcagttttgcaacactctttttgtggaatatgcaagtggatattagggcagctttgaggatttcgttggaaacgggaatacatgtaaaaagcagacagcagcattctcagaaacttctttgtgatgtttgcattgaagtcacagagttgaacattccctttgagagagcaggtttgaaacacgccttttgtcatatctggaagtgtccattcggagcgcattcaggcttgtgttgaaaaaggaaatatcctcccataaaaactagacagaagcattctcagaaacttatctgtgatgtatgtactcaactaacagaactaaaccatcgttttgaaggagcagttttgaaacactctttttgcggaatctgcaagtggatatttggctagctgggaggatttcgttggaaacgggattacatacaaaaagcagacagcagcattctcagaaacttctttgtgatgtttgcattcaagtcacagagttgaacattccctttcatagagcaggtttgaaacactctttttgtagtatctggatgtggacatttggatcgcttcaggcctatggtgaaaaaggaaatatcttcccatgaaaactagacagaagcattctcagaaatttatttgtgatgtgtgccctcaactaacagagttgaacctttcttttgatagagcagttttgaaacactctttttgtaaaatctgcaagaggatatttggatagctttgaggatttcgttgcaaacgggaatggcttcatataaactctagacagaagcattctcagaaacttcgttgggatgtttcgattgaagtcccagtgttgaacattcccttttatagagcaggttggaaacactctttctgcattccctggaagtggacatttggagcgctttcaggacgacggtgaaaatggaaatatcttccaagaaaatctagatagaagcaacgtcagaaacttttctgtgatggatctactcagctaacagagttgaacctttcttttgagagagcagttttgcaacactctttttgtggaatatgcaagtggatattagggcagctttgaggatttcgttggaaacgggaatacatgtaaaaagcagacagcagcattctcagaaacttctttgtgatgtttgcattgaagtcacagagttgaacattccctttgagagagcaggtttgaaacacgccttttgtcatatctggaagtgtccattcggagcgcattcaggcttgtgttgaaaaaggaaatatcctcccataaaaactaggacggaagcattctcagaaacttatctgtgatgtatgtactcaactaacagaactaaaccatcgttttgaaggagcagttttgaaacactctttttgcggaatctgcaagtggatatttggctagctgggaggatttcgttggaaacgggattacatacaaaaagcagacagcagcattctcagaaacttctttgtgatgtttgcattcaagtcacagagttgaacattccctttcatagagcaggtttgaaacactctttttgtagtatctggatgtggacatttggatcgctttcaggcctatggtgaaaaaggaaatatcttcccatgaaaactagacagaagcattctcagaaacttatttgtgatgtgtgccctcaactgacagtgttgaacctttgttttgatagagcagttctgaaacacactttttgtaaaatctgcaagaggatatttggatagctttgaggatttcgttggaaacgggaatgtcttcatgtaaactctacacagaagcattctcagaaactgctttgggatgtttcaattgaagtcccagtgttgaacattccctttcatagagcaggtttgaaaccctctttttgtactatctggaagtggacatttggagcgctttcaggtctacggtgaaaaaggagatatcttccaataaaaactagatagaagcaatgtcagaacttttttcatgatgtatctactcagcaaacagagttgaacctttcttttgagagagcagttttgaaacactccttttgtggaatatgcaagtgggtattaggccagcttggaggatttcgttggaaacgggaatacgtataaaaagcagacagcagcattgtcagaaactactttgtgatgtttgcattcaagtcacagaattgaacactccctttcacagagcaggtttgaaactctctttttgtagtgtctataagtgaacatttggcgtgctttcaggcgtaacgtgaaaaaggaaatatcttcccataaaaactagacagaagcattctcagaaacttgttcttgatgtgtgccctctactgacagagttgaacctttctttgcaaagagcagttttgaaacactctttttgtagaatctgcaagaggatatttggatagctttgaggatttctttggaaacgggaatgtcttcagataaactctagacagaagcattctcagaaacttctttgggatgtttcaattgaagtcacagtgttgaacattccctttcacagagcaggtttgaaacactctttttgtagtgtctataagtgaacatttggcgtgctttcaggcctaacgtgaaaaaggaaatatcttcccataaaaactagacagaagcattctcagaaacttgttcatgatgtgtgccctctactgacagagttgaacctttctttgcaaagagcagctttgaaacactctttttgtagaatctgcaagaggatatttggatagctttgaggatttcgttggaaacgggtatgtcttcagataaactgtagacagaagcattctcagaaacttctttgggatgttgcattcaagtcacagagtagaacattcccattcatagagcagatttgaaacactctttttgtagtatctggaagtggacatttggagcgctttcaggcctatgttgaaaaaggaaatatcttcccataaaaactagacggaagcattctcagaaacttacttgtgatgtgttggctcaactaacagaattgaaccatcgttttgaaggagcagttttgaaacactgttttcgtggaatctgcaagtggatatttggctagctttgaggatttcgttggaaacgggattacatataaaaaggagacagcagcattctcagaaacttctttgtgatgtctgcattcaagtcacagagttgagcattctctttcatagagcaggttggaaacactctttttgtagtatctggatgaggacatttggagcgctttcaggcctatggtgaaaaaggaaatatcttcccgtaaaaactagacagaagcattctcagaaacttatttgtgatgtgtgccctcaactgacagtgttgaacctttgttttgatagagcagttctgaaacacactttttgtaaaatctgcaagaggatatttggatagctttgaggatttcgttggaaacgggaatgtcttcatgtaaactctagacagaagcattctcagaaactgctttgggatgtttcaattgaagtcccagtgttgaacattccctttcatagagcaggtttgaaacactctttttgtactatctggaagtggacatttggagcgctttcaggtctacggtgaaaaaggagatatcttccaataaaaactagatagaagcaatgtcagaacttttttcatgatgtatctactcagcaaacagagttgaacctttcttttgagagagcagttttgaaacactctttttgtggaatatgcaagtgggtattaggccagcttggaggatttcgttggaaacgggaatacgtataaaaagcagacagcagcattgtcagaaactactttgtgatgtttgcattcaagtcacagaattgaacactccctttcacagagcaggtttgaaacactctttttgtagtgtctgtaagtgaacatttggattgctttcaggcctaaggtgaaaaaggaaatatcttcccataaaaactagacagaagcattctcagaaacttgtttgtgatgtgtgccctctactgacagagttgaacctttctttgcaaagagcagctttgaaacactctttttgtagaatctgcaagaggatatttggatagctttgaggatttcttgggaaacgggaatgtcttcagataaactctagacagaagcattctcagaaacttctttgggatgttgcattcaagtcacagagtagaacattcccattcatagagcagatttgaaacactctttttgtagtatctggaagtggacatttggagcgctttcaggcctatgttgaaaaaggaaatatcttcccataaaaactagacggaagcattctcagaaacttatttgtgatgtgtttgctcaactaacaggattgaaccatcgttttgaaggagcagttttgaaacactgttttcgtggaatctgcaagtggatatttggctagctttgaggatttcgttggaaacgggattacatataaaaaggagacagcagcattctgagaaacttctttgtgatgtctgcattcaattcacagagttgagcattccctttcatagagcaggttggaaacactctttttgtagtatctggatgtggacatttggatcgctttcaggcctatggtgaaaaaggaaatatcttcccatgaaaactagacagaagcattctcagaaacttatttgtgatgtgtgccctcaactgacagtgttgaacctttgttttgatagagcagttctgaaacacactttttgtaaaatctgcaagaggatatttggatagctttgaggatttcgttggaaacgggaatgtcttcatgtaaactctagacagaagcattctcagaaactgctttgggatgtttcaattgaagtcccagtgttgaacattcccattcatagagcaggtttgaaacactctttttgtactatctggaagtggacatttggagcgctttcaggtctacggtgaaaaaggagatatcttccaataaaaactagatagaagcaatgtcagaacttttttcatgatgtatctactcagcaaacagagttgaacctttcttttgagagagcagttttgaaacactctttttgtggaatatgcaagtgggtattaggccagcttggaggatttcgttggaaacgggaatacgtataaaaagcagacagcagcattgtcagaaactactttgtgatgtttgcattcaagtcacagaattgaacactccctttcacagagcaggtttgaaacactctttttgtagtgtctgtaagtgaacatttggattgctttcaggcctaaggtgaaaaaggaaatatcttcccataaaaactagacagaagcattctcagaaacttgtttgtgatgtgtgccctctactgacagagttgaacctttctttgcaaagagcagttttgaaacactctttttgtagaatctgcaagaggatgtttggatagctttgaggatttcttgggaaacgggaatgtcttcagataaactctagacagaagcattctcagaaacttctttgggatgtttcaattgaagtcacagtgttgaacattccctttcacagagcaggtttgaaacactctttttgtagtgtctataagtgaacatttggcgtgctttcaggcctaacgtgaaaaaggaaatatcttcccataaaaactagacagaagcattctcagaaacttgttcgtgatgtgtgccctctactgacagagttgaacctttctttgcaaagagcagctttgaaacactctttttgtagaatctgcaagaggatatttggatagctttgaggatttcgttggaaacgggtatgtcttcagataaactctagacagaagcattctcagaaacttctttgggatgttgcattcaagtcacagagtagaacattcccattcatagagcagatttgaaacactctttttgtagtatctggaagtggacatttggagcgctttcaggcctatgttgaaaaaggaaatatcttcccataaaaactagacggaagcattctcagaaacttacttgtgatgtgtttgctcaactaacagaattgaaccatcgttttgaaggagcagttttgaaacactgttttcgtggaatctgcaagtggatatttggctagctttgaggatttcgttggaaacgggattacatataaaaaggagacagcagcattctcagaaacttctttgtgatgtctgcattcaattcacagagttgagcattccctttcctagagcacgttggaaacactctttttgtagtatctggatgaggacatttggagcgctttcaggcgtatggtgaaaaaggaaatatcttcccgtaaaaactagacagaagattctcagaaatttatttgtgatgtgtgccctcaactaacagagttgaacctttcttttgatagagcagttttgaaacactctttttgtaaaatctgcaagaggatatttggatagctttgaggatttcgttgcaaacgggaatggcttcatataaactctagacagaagcattctcagaaacttcgttgggatgtttcgattgaagtcccagtgttgaacattcccttttatagagcaggttggaaacactctttctgcattccctggaagtggacatttggagcgctttcaggacgacggtgaaaatggaaatatcttccaagaaaatctagatagaagcaacgtcagaaacttttatgtgatggatctactcagctaacagagttgaacctttcttttgagagagcagttttgcaacactctttttggggaatatgcaagtggatattagggcagctttgaggatttcgttggaaacgggaatacatgtaaaaagcagacagcagcattctcagaaacttctttgtgatgtttgcattgaagtcacagagttgaacatcccctttgagagagcaggtttgaaacacgccttttgtcatatctggaagtgtccattcggagcgcattcaggcttgtgttgaaaaaggaaatatcctcccataaaaactagacagaagcattctcagaaacttatctgtgatgtatgtactcaactaacagaactaaaccatcgttttgaagggcagttttgaaacactctttttgcggaatctgcaagtggatatttggctagctgggaggatttcgttggaaacgggattacatacaaaaagcagacagcagcattctcagaaacttctttgtgatgtttgcattcaagtcacagagttgaacattccctttcatagagcaggtttgaaacactctttttgtagtatctggatgtggacatttggatcgctttcaggcctatggtgaaaaaggaaatatcttcccatgaaaactagacagaagcattctcagaaacttatttgtgatgtgtgccctcaactgacagtgttgaacctttgttttgatagagcagttctgaaacacactttttgtaaaatctgcaagaggatatttggatagctttgaggatttcgttggaaacgggaatgtcttcatgtaaactctacacagaagcattctcagaaactgctttgggatgtttcaattgaagtcccagtgttgaacattcccattcatagagcaggtttgaagcactctttttgtactatctggaagtggacatttggagcgctttcaggtctacggtgaaaaaggagatatcttccaataaaaactagatagaagcaatgtcagaacttttttcatgatgtatctactcagcaaacagagttgaacctttcttttgagagagcagttttgaaacactctttttgtggaatatgcaagtgggtattaggccagcttggaggatttcgttggaaacgggaatacgtataaaaagcagacagcagcattgtcagaaactactttgtgatgtttgcattcaagtcacagaattgaacactccctttcacagagcaggtttgaaacactctttttgtagtgtctgtaagtgaacatatggattgctttcaggcctaaggtgaaaaaggaaatatcttcccataaaaactagacagaagcattctcagaaacttgtttgtgatgtgtgccctctactgacagagttgaacctttctttgcaaagagcagttttgaaacactctttttgtagaatctgcaagaggatatttggatagctttgaggatttcttgggaaacgggaatgtcttcagataaactctagacagaagcattctcagaaacttctttgggatgtttcaattgaagtcacagtgttgaacattccctttcacagagcaggtttgaaacagtctttttgtagtgtctataagtgaacatttggcgtgctttcaggcctaacgtgaaaaaggaaatctcttcccataaaaactagacagaagcattctcagaaacttgtttgtgatgtgtgccctctactgacagagttgaacctttctttgcaaagagcagctttgaaacactctttttgtagaatctgcaagaggatatttggatagctttgaggatttcgttggaaacgggtatgtcttcacataaactctagacagaagcattctcagaaacttctttgggatgttgcattcaagtcacagagtagaacattcccattcatagagcagatttgaaacactctttttgtagtatctggaagtggacatttggagcgctttcaggcctatgttgagaaacgaaatatcttcccataaaaactagacggaagcattctcagaaacttatttttgatgtgtttgctcaactaacagaattgaaccatcgttttgaaggagcagttttgaaaccctgttttcgtggaatctgcaagtggatatttggctagctttgaggatttcgttggaaacgggattacctataaaaaggagacagcagcattctcagaaacttctttgtgatgtctgcattcaagtcacagagttgagcattccctttcatagagcaggtttgaaacactctttttgtagtatctggatgaggacatttggagcgctttcaggcgtatggtgaaaaaggaaatatcttcccgtaaaaactagacagaagcattctcagaaatttatttgtgatgtgtgccctcaactaacagagttgaacctttcttttgatagagcagttttgaaacactctttttgtaaaatctgcaagaggatatttggatagctttgaggatttcgttgcaaacgggaatggcttcatataaactctagacagaagcattctcagaaacttcgttgggatgtttcgattgaagtcccagtgttgaacattcccttttatagagcaggttggaaacactctttctgcattccctggaagtggacctttggagcgctttcaggacgacggtgaaaatggaaatatcttccaataaaatctagatagaagcaatgtcagaaacttttatgtgatggatctactcagctaacagagttgaacctttcttttgagagagcagttttgcaacactctttttgtggaatatgcaagtggatattagggcagctttgaggatttcgttggaaacgggaatacatgtaaaaagcagacagcaccattctcagaaacttctttgtgatgtttgcattgaagtcacagagttgaacattccctttgagagagcaggtttgaaacacgccttttgtcatatctggaagtgtccattcggagcgcattcaggcttgtgttgaaaaaggaaatatcctcccataaaaactagacagaagcattctcagaaacttatctgtgatgtatgtactcaactaacagaactaaaccatcgttttgaaggagcagttttgaaacactctttttgcggaatctgcaagtggatatttggctagctgggaggatttcgttggaaacgggattacatacaaaaagcagacagcagcattctcagaaacttctttgtgatgtttgcattcaagtcacagagttgaacattccctttcatagagcaggtttgaaacactctttttgtagtatctggatgtggacatttggatcgctttcaggcctatggtgaaaaaggaaatatcttcccatgaaaactagacagaagcattctcagaaacttatttgtgatgtgtgccctcaactgacagtgttgaacctttgttttgatagagcagttctgaaacacactttttgtaaaatctgcaagaggatatttggatagctttgaggatttcgttggaaacgggaatgtcttcatgtaaactctacacagaagcattctcagaaactgctttgggatgtttcaattgaagtcccagtgttgaacattcccattcatagagcaggtttgaagcactctttttgtactatctggaagtggacatttggagcgctttcaggtctacggtgaaaaaggagatatcttccaataaaaactagatagaagcaatgtcagaacttttttcatgatgtatctactcagcaaacagagttgaacctttcttttgagagagcagttttgaaacacactttttgtggaatatgcaagtgggtattaggccagcttggaggatttcgttggaaacgggaatacgtataaaaagcagacagcagcattgtcagaaactactttgtgatgtttgcattcaagtcacagaattgaacactccctttcacagagcaggtttgaaacactctttttgtagtgtctgtaagtgaacatttggattgctttcaggcctaaggtgaaaaaggaaatatcttcccataaaaactagacagaagcattctcagaaacttgtttgtgatgtgtgccctctactgacagagttgaacctttctttgcaaagagcagttttgaaacactttttttgtagaatctgcaagaggatatttggatagctttgaggatttcttgggaaacgggaatgtcttcagataaactctagacagaagcattctcagaaacttctttgggatgtttcaattgaagtcacagtgttgaacattccctttcacagagcaggtttgaaacactctttttgtagtgtctataagtgaacatttggcgtgctttcaggcctaacgtgaaaaaggaaatatcttcccataaaaactagacagaagcattctcagaaacttgttcatgatgtgtgccctctactgacagagttgaacctttctttgcaaagagcagctttgaaacactctttttgtagaatctgcaagaggatatttggatagctttgaggatttcgttggaaacgggtatgtcttcagataaactctagacagaagcattctcagaaacttctttgggatgttgcattcaagtcacagagtagaacattcccattcatagagcagatttgaaacactctttttgtagtatctggaagtggacatttggagcgctttcaggcctatgttgaaaaaggaaatatcttcccataaaaactagacggaagcattctcagaaacttacttgtgatgtgtttgctcaactaacagaattgaaccatcgttttgaaggagcagttttgaaacactgttttcgtggaatctgcaagtggatatttggctagctttgaggatttcgttggaaacgggattacatataaaaaggagacagcagcattctcagaaacttctttgtgatgtctgcattcaattcacagagttgagcattccctttcatagagcaggttggaaacactctttttgtagtatctggatgaggacatttggagcgctttcaggcctatggtgaaaaaggaaatatcttcccgtaaaaactagacagaagcattctcagaaatttatttgtgatgtgtgccctcaactaacagagttgaacctttcttttgatagagcagttttgaaacactctttttgtaaaatctgcaagaggatatttggatagctttgaggatttcgttgcaaacgggaatggcttcatataaactctagacagaagcattctcagaaacttcgttgggatgtttcgattgaagtcccagtgttgaacattcccttttatagagcaggttggaaacactctttctgcattccctggaagtggacatttggagcgctttcaggacgacggtgaaaatggaaatatcttccaagaaaatctagatagaagcaacgtcagaaacttttatgtgatggatctactcagctaacagagttgaacctttcttttgagagagcagttttgcaacactctttttgtggaatatgcaagtggatattagggcagctttgaggatttcgttggaaacgggaatacatgtaaaaagcagacagcagcattctcagaaacttctttgtgatgtttgcattgaagtcacagcagttgaacattccctttgagagagcaggtttgaaacacgccttttgtcatatctggaagtgtccattcggagcgcattcaggcttgtgttgaaaaaggaaatatcctcccataaaaactagacagaagcattctcagaaacttatctgtgatgtatgtactcaactaacagaactaaaccatcgttttgaaggagcagttttgaaacactctttttgcggaatctgcaagtggatatttggctagctgggaggatttcgttggaaacgggattacatacaaaaagcagacagcagcattctcagaaacttctttgtgatgtttgcattcaagtcacagagttgaacattccctttcatagagcaggtttgaaacactctttttgtagtatctggatgtggacatttggatcgctttcaggcctatggtgaaaaaggaaatatcttcccatgaaaactagacagaagcattctcagaaacttatttgtgatgtgtgccctcaactgacagtgttgaacctttgttttgatagagcagttctgaaacacactttttgtaaaatctgcaagaggatatttggatagctttgaggatttcgttggaaacgggaatgtcttcatgtaaactctacacagaagcattctcagaaactgctttgggatgtttcaattgaagtcccagtgttgaacattcccattcatagagcaggtttgaaacactctttttgtaatatctggaagtggacatttggagcgctttcaggtctacggtgaaaaaggagatatcttccaataaaaactagatagaagcaatgtcagaacttttttcatgatgtatctactcagctaacagagttgaacctttcttttgagagagcagttttgaaacactctttttgtggaatatgcaagtgggtattaggccagcttggaggatttcgttggaaacgggaatacgtataaaaagcagacagcagcattgtcagaaactactttgtgatgtttgcattcaagtcacagaattgaacactccctttcacagagcaggtttgaaacactctttttgtagtgtctgtaagtgaacatatggattgctttcaggcctaaggtgaaaaaggaaatatcttcccataaaaactagacagaagcattctcagaaacttgtttgtgatgtgtgccctctactgacagagttgaacctttctttgcaaagaccagttttgaaacactctttttgtagaatctgcaagaggatatttggatagctttgaagatttcttgggaaacgggaatgtcttcagataaactctagacagaagcattctcagaaacttctttgggatgtttcaattgaagtcacagtgttgaacattccctttcacagagcaggtttgaaacactctttttgtagtgtctataagtgaacatttggcgtgctttcaggcctaacgtgaaaaaggaaatatcttcccataaaaactagacagaagcattctcagaaacttgttcttgatgtgtcccctctactgacagagttgaacctttctttgcaaagagcagctttgaaacacactttttgtagaatctgcaagaggatatttggatagctttgaggatttcgttggaaacgggtatgtcttcagataaactctagacagaagcattctcagcaaacttctttgggatgttgcattcaagtcacagagtagaacattcccattcatagagcagatttgaaacactctttttgtagtatctggaagtggacatttggagcgctttcaggcctatgttgaaaaaggaaatatcttcccataaaaactagacggaagcattctcagaaacttacttgtgatgtgtttgctcaactaacagaattgaaccatcgttttgaagaagcagttttgaaacactgttttcgtggaatctgcaagtggatatttggctagctttgaggatttcgttggaaacgggattacatataaaaaggagacagcagcattctcagaaacttctttgtgatgtctgcattcaagtcacagagttgagcattccctttcatagagcaggttggaagcactctttttgtagtatctggatgaggacatttggagcgctttcaggcctatggtgaaaaaggaaatatcttcccgtaaaaactagacagaagcattctcagaaatttatttgtgatgtgtgccctcaactaacagagttgaacctttcttttgatagagcagttttgaaacactctttttgtaaaatctgcaagaggatatttggatagctttgaggatttcattgcaaacgggaatggcttcatataaactctagacagaagcattctcagaaacttcgttgggatgtttcgattgaagtcccagtgttgaacattcccttttatagagcaggttggaaacactctttctgcattccctggaagtggacatttggagcgctttcaggacgacggtgaaaatggaaatatcttccaataaaatctagatagaagcaacgtcagaaacttttatgtgatggatctactcagctaacagagttgaacctttcttttgagagagcagttttgcaacactctttttgtggaatatgcaagtggatattagggcagctttgaggatttcgttggaaacgggaatacatgtaaaaagcagacagcagcattctcagaaacttctttgtgatgtttgcattgaagtcacagcagttgaacattccctttgagagagcaggtttgaaacacgccttttgtcatatctggaagtgtccattcggagcgcattcaggcttgtgttgaaaaaggaaatatcctcccataaaaactagacagaagcattctcagaaacttatctgtgatgtatgtactcaactaacagaactaaaccatcgttttgaaggagcagttttgaaacactctttttgcggaatctgcaagtggatatttggctagctgggaggatttcgttggaaacgggattacatacaaaaagcagacagcagcattctcagaaacttctttgtgatgtttgcattcaagtcacagagttgaacattccctttcatagagcaggtttgaaacactctttttgtagtatctggatgtggacatttggatcgctttcaggcctatggtgaaaaaggaaatatcttcccatgaaaactagacagaagcattctcagaaacttatttgtgatgtgtgccctcaactgacagtgttgaacctttgttttgatagagcagttctgaaacacactttttgtaaaatctgcaataggatatttggatagctttgaggatttcgttggaaacgggaatgtcttcatgtaaactctagacagaagcattctcagaaactgctttgggatgtttcaattgaagtcccagtgttgaacattccctttcatagagcaggtttgaaacactctttttgtactatctggaagtggacatttggagcgctttcaggtctacggtgaaaaaggagatatcttccaataaaaactagatagaagcaatgtcagaacttttttcatgatgtatctactcagcaaacagagttgaacctttcttttgagagagcagttttgaaacactctttttgtggaatatgcaagtgggtataaggccagcttggaggatttcgttggaaacgggaatacgtataaaaagcagacagcagcattgtcagaaactactttgtgatgtttgcattcaagtcacagaattgaacactccctttcacagagcaggtttgaaacactctttttgtagtgtctgtaagtgaacatttggattgctttcaggcctaaggtgaaaaaggaaatatcttcccataaaaactagacagaagcattctcagaaacttgtttgtgatgtgtgccctctactgacagagttgaacctttctttgcaaagagcagttttgaaacactctttttgtagaatctgcaagaggatatttggatagctttgaggatttcttgggaaacgggaatgtcttcagataaactctagacagaagcattctcagaaacttctttgggatgtttcaattgaagtcacagtgttgaacattccctttcacagagcaggtttgaaacactctttttgtagtgtctataagtgaacatttggcgtgctttcaggcctaacgtgaaaaaggaaatatcttcccataaaaactagacagaagcattctcagaaacttgttcgtgatgtgtgccctctactgacagagttgaacctttctttgcaaagagcagctttgaaacactctttttgtagaatctgccagaggatatttggatagctttgaggatttcgttggaaacgggtatgtcttcagataaactctagacagaagcattctcagaaacttctttgggatgttgcattcaagtcacagagtagaacattcccattcatagagcagatttgaaacactctttttgtagtatctggaagtggacatttggagcgctttcaggcctatgttgaaaaaggaaatatcttcccataaaaactagacggaagcattctcagaaacttacttgtgatgtgtttgctcaactaacagaattgaaacatcgttttgaaggagcagttttgaaacactgttttcgtggaatctgcaattggatatttggctagctttgaggatttcgttggaaacgggattacatataaaaaggagacagcagcattctcagaaacttctttgtgatgtttgcattcaagtcacagagttgaacattccctttcatagagcaggtttgaaacactctttttgtagtatctggatgtggacatttggattgctttcaggcctatggtgaaaaaggaaatatcttcccatgaaaactagacagaagcattctcagaaacttatttgtgatgtgtgccctcaactgacagtgttgaacctttgttttgatagagcagttctgaaacacactttttgtaaaatctgcaagaggatatttggatagctttgaggatttcgttggaaacgggaatgtcttcatgtaaactctagacagaagcattctcagaaactgctttgggatgtttcaattgaagtcccagtgttgaacattccctttcatagagcaggtttgaaacactctttttgtactatctggaagtggacatttggagcgctttcaggtctacggtgaaaaaggagatatcttccaataaaaactagatagaagcaatgtcagaacttttttcatgatgtatctactcagcaaacagagttgaacctttcttttgagagagcagttttgaaacactctttttgtggaatatgcaagtgggtattaggccagcttggaggatttcgttggaaacgggaatacgtataaaaagcagacagcagcattctcagaaacttctttgggatgtttcaattgaagtcacagtgttgaacactccctttcacagagcaggtttgaaacactctttttgtagtgtctgtaagtgaacatttggattgctttcaggcctaaggtgaaaaaggaaatatcttcccataaaaactagacagaagcattctcagaaacttgtttgtgatgtgtgccctctactgacagagttgaacctttctttgcaaagagcagttttgaaacactctttttgtagaatctgcaagaggatatttggatagctttgaggatttcttgggaaacgggaatgtcttcagataaactctagacagaagcattctcagaaacttctttgggatgtttcaattgaagtcacagtgttgaacattccctttcacagagcaggtttgaaacactctttttgtagtgtctataagtgaacatttggcgtgctttcaggcctaacgtgaaaaaggaaatatcttcccataaaaactagacagaagcattctcagaaacttgttcatgatgtgtgccctctactgacagagttgaacctttctttgcaaagagcagctttgaaacactctttttgtagaatctgcaagaggatatttggatagctttgaggatttcgttggaaacgggtatgtcttcagataaactgtagacagaagcattctcagaaacttctttgggatgttgcattcaagtcacagagtagaacattcccattcatagagcagatttgaaacactctttttgtagtatctggaagtggacatttggagcgctttcaggcctatgttgaaaaaggaaatatcttcccataaaaactagacggaagcattctcagaaacttatttgtgatgtgtttgctcaactaacaggattgaaccatcgttttgaaggagcagttttgaaacactgttttcgtggaatctgcaagtggatatttggctagctttgaggatttcgttggaaacgggattacatataaaaaggagacagcagcattctcagaaacttctttgtgatgtctgcattcaattcacagagttgagcattccctttcatagagcaggttggaaacactctttttgtagtatctggatgaggacatttggagcgctttcaggcgtatggtgaaaaaggaaatatcttcccgtaaaaactagacagaagcattctcagaaatttatttgtgatgtgtgccctcaactaacagagttgaacctttcttttgatagagcagttttgaaacactctttttgtaaaatctgcaagaggatatttggatagctttgaggatttcgttgcaaacgggaatggcttcatataaactctagacagaagcattctcagaaacttcgttgggatgtttcgattgaagtcccagtgttgaacattcccttttatagagcaggttggaaacactctttctgcattccctggaagtggacatttggagcgctttcaggacgacggtgaaaatggaaatatcttccaagaaaatctagatagaagcaatgtcagaaacttttatgtgatggatctactcagctaacagagttgaacctttcttttgagagagcagttttgcaacactctttttgtggaatatgcaagtggatattagggcagctttgaggatttcgttggaaacgggaatacatgtaaaaagcagacagcagcattctcagaaacttctttgtgatgtttgcattgaagtcacagagttgaacattccctttgagagagcaggtttgaaacacgccttttgtcatatctggaagtgtccattcggagcgcattcaggcttgtgttgaaaaaggaaaatatcctcccataaaaactagacagaagcattctcagaaacttatctgtgatgtatgtactcaactaacagaactaaaccatcgttttgaaggagcagttttgaaacactctttttgcggaatctgcaagtggatatttggctagctgggaggatttcgttggaaacgggattacatacaaaaagcagacagcagcattctcagaaacttctttgtgatgtttgcattcaagtcacagagttgaacattccctttcatagagcaggtttgaaacactctttttgtagtatctggatgtggacatttggatcgctttcaggcctatggtgaaaaaggaaatatcttcccatgaaaactagacagaagcattctcagaaacttatttgtgatgtgtgccctcaactgacagtattgaacctttgttttgatagagcagttctgaaacacactttttgtaaaatctgcaagaggatatttggatagctttgaggatttcgttggaaacgggaatgtcttcatgtaaactctagacagaagcattctcagaaactgctttgggatgtttcaattgaagtcccagtgttgaacattcccattcatagagcaggtttgaaacactctttttgtactatctggaagtggacatttggagcgctttcaggtctacggtgaaaaaggagatatcttccaataaaaactagatagaagcaatgtcagaacttttttcatgatgtatctactcagctaacagagttgaacctttcttttgagagagcagttttgaaacactctttgtgtggaataggcaagtgggtattaggccagcttggaggatttcgttggaaacgggaatacgtataaaaagcagacagcagcattgtcagaaactactttgtgatgtttgcattcaagtcacagaattgaacactccctttcacagagcaggtttgaaacactctttttgtagtgtctgtaagtgaacatatggattgctttcaggcctaaggtgaaaaaggaaatatcttcccataaaaactagacagaagcattctcagaaacttgtttgtgatgtgtgccctctactgacagagttgaacctttctttgcaaagaccagttttgaaacactctttttgtagaatctgcaagaggatatttggatagctttgaggatttcttgggaaacgggaatgtcttcagataaactctagacagaagcattctcagaaacttctttgggatatttcaattgaagtcacagtgttgaacattccctttcacagagcaggtttgaaacactctttttgtagtgtctataagtgaacatttggcgtgctttcaggcctaacgtgaaaaaggaaatatcttcccataaaaactagacagaagcattctcagaaacttgttcgtgatgtgtgccctctactgatagagttgaacctttctttgcaaagagcagctttgaaacactctttttgtagaatctgcaacaggatatttggatagctttgaggatttcgttggaaacgggtatgtcttcagataaactctagacagaagcattctcagaaacttctttgggatgttgcattcaagtcacagagtagaacattcccattcatagagcagatttgaaacactctttttgtagtatctggaagtggacatttggagcgctttcaggcctatgttgaaaaaggaaatatcttcccataaaaactagacggaagcattctcagaaacttacttgtgatgtgtttgctcaactaacagaattgaaccatcgttttgaaggagcagttttgaaacactgttttcgtggaatctgcaagtggatatttggctagctttgaggatttcgttggaaacgggattacatataaaaaggagacagcagcattctcagaaacttctttgtgatgtctgcattcaagtcacagagttgagcattccctttcatagagcaggttggaaacactctttttgtagtatctggatgaggacatttggagcgctttcaggcgtatggtgaaaaaggaaatatcttcccgtaaaaactagacagaagcattctcagaaatttatttgtgatgtgtgccctcaactaaccgagttgaacctttcttttgatagagcagttttgaaacactctttttgtaaaatctgcaagaggatatttggatagctttgaggatttcgttgcaaacgggaatggcttcatataaactctagacagaagcattctcagaaacttcgttgggatgtttcgattgaagtcccagtgttgaacattcccttttatagagcaggttggaaacactctttctgcattccctggaagtggacatttggagcgctttcaggacgacggtgaaaatggaaatatcttccaagaaaatctagatagaagcaacgtcagaaacttttctgtgatggatctactcagctaacagagttgaacctttcttttgagagagcagttttgcaacactctttttgtggaatatgcaagtggatattagggcagctttgaggatttcgttggaaacgggaatacatgtaaaaagcagacagcagcattctcagaaacttctttgtgatgtttgcattgaagtcacagagttgaacattccctttgagagagcaggtttgaaacacgccttttgtcatatctggaagtgtccattcggagcgcattcaggcttgtgttgaaaaaggaaatatcctcccataaaaactagacagaagcattctcagaaacttatctgtgatgtatgtactcaactaacagaactaaaccatccttttgaaggagcagttttgaaacactctttttgcggaatctgcaagtggatatttggctagctgggaggatttcgttggaaacgggattacatacaaaaagcagacagcagcattctcagaaacttatttgtgatgtgtgccctcaactgacaagtgttgaacctttgttttgatagagcagttctgaaacacactttttgtaaaatctgcaagaggatatttggatagctttgaggatttcgttggaaacgggaatgtcttcatgtaaactctagacagaagcattctcagaaactgctttgggatgtttcaattgaagtcccagtgttgaacattcccattcatagagcaggtttgaaacactctttttgtactatctggaagtggacatttggagcgctttcaggtctacggtgaaaaaggagatatcttccaataaaaactagatagaagcaatgtcagaacttttttcatgatgtatctactcagctaacagagttgaacctttcttttgagagagcagttttgaaacactctttttgtggaatatgcaagtgggtattaggccagcttggaggatttcgttggaaacgggaatacgtataaaaagcagacagcagcattgtcagaaactactttgtgatgtttgcattcaagtcacagaattgaacactccctttcacagagcaggtttgaaacactctttttgtagtgtctataagtgaacatttggcgtgctttcaggcctaaggtgaaaaaggaaatatcttcccataaaaactagacagaagcattctcagaaacttgttcgtgatgtgtgccctctactgacagagttgaacctttctttgcaaagagcagctttgaaacactctttttgtagaatctgcaagaggatatttggatagctttgaggatttcgttggaaacgggtatgtcttcagataaactctagacaggaagcattctcagaaacttctttgggatgttgcattcaagtcacagagtagaacattcccattcatagagcagatttgaaacactctttttgtagtatctggaagtggacatttggagcggtttcaggcctatgttgaaaaaggaaatatcttcccataaaaactagacggaagcattctcagaaacttacttgtgatgtgtttgctcaactaacagaattgaaccatcgttttgaaggagcagttttgaaacactgttttcgtggaatctgcaagtggatatttggctagctttgaggatttcgttggaaacgggattacatataaaaaggagacagcagcattctcagaaacttctttgtgatgtctgcattcaagtcacagagttgagcattccctttcatagagcaggttggaaacactctttttgtagtatctggatgaggacatttggagcgctttcaggcgtatggtgaaaaaggaaatatcttcccgtaaaaactagacagaagcattctcagaaatttatttgtgatgtgtgccctcaactaacagagttgaacctttcttttgatagagcagttttgaaacactctttttgtaaaatctgcaagaggatatttggatagctttgaggatttcgttgcaaacgggaatggcttcatataaactctagacagaagcattctcagaaacttcgttgggatgtttcgattgaagtcccagtgttgaacattcccttttatagagcaggttggaaacactctttctgcattccctggaagtggacatttggagcgctttcaggacgacggtgaaaatggaaatatcttccaataaaatctagatagaagcaacgtcagaaacttttatgtgatggatctactcagctaacagagttgaacctttcttttgagagagcagttttgcaacactctttttgtggaatatgcaagtggatattagggcagctttgaggatttcgttggaaacgggaatacatgtaaaaagcagacagcagcattctcagaaacttctttgtgatgtttgcattgaagtcacagagttgaacattccctttgagagagcaggtttgaaacacgccttttgtcatatctggaagtgtccattcggagtgcattcaggcttgtgttgaaaaaggaaatatcctcccataaaaactagacagaagcattctcagaaacttatctgtgatgtatgtactcaactaacagaactaaaccatcgtcttgaaggagcagttttgaaacactctttttgcggaatctgcaagtggatatttggctagctgggaggatttcgttggacacgggattacatacaaaaagcagagagcagcattctcagaaacttatttgtgatgtgtgccctcaactgacagtgttgaacctttgttttgatagagcagttctgaaacacactttttgtaaaatctgcaagaggatatttggatagctttgaggatttcgttggaaacgggaatgtcttcatgtaaactctagacagaagcattctcagaaactgctttgggatgtttcaattgaagtcccagtgttgaacattccctttcatagagccggtttgaaacactctttttgtagtatctggaagtggacatttggagcgctttcaggtcaacggtgaaaaaggagatatcttccaataaaaactagatagaagcaatgtcagaacttttttcatgatgtatctactcaacaaacagagttgaacctttcttttgagagagcacttttgaaacactctttttgtggaatatgcatgtgggtattaggccagcttggaggatttcgttggaaacgggaatacgtataaaaagcagacagcagcattgtcagaaactactttgtgatgtttgcattcaagtcacagaattgaacactccctttcacagagcaggtttgaaacactctttttgtagtgtctgtaagtgaacatttggattgctttcaggcctaaggtgaaaaaggaaatatcttcccataaaaactagacagaagcattctcagaaacttgtttgtgatgtgtgccctctactgacggagttgaacctttctttgcaaagagcagttttgaaaccctctttttgtagaatctgcaagaggatatttgcatagctttgagtatttcttgggaaacgggaatgtcttcagataaactctatacagaagcattctcagaaacttctttgggatgtttcaattgaagtcacagtgttgaacattccccttcacagagcaggtttgaaacactctttttgtagtgtctataagtgaacatttggcgtgctttcaggcctaacgtgaaaaacgaaatatcttcccataaaaactagacagaagcattctcagaaacttgttcgtgatgtgtgccctctactgacagagttgaacctttctttgcaaagagcagctttgaaacacactttttgtagaatctgcaagaggatatttggatagcttggaggatttcgttggaaacgggtatgtcttcagataaactctagacagaagcattctcagaaacttctttgggatgttgcattcaagtcacagagtagaacattcccattcatagagcagatttgaaacactctttttgtagtatctggaagtggacatttggagcgctttcaggcctatgttgaaaaaggaaatatcttcccataaaaactagacggaagcattctcagaaacttatttgtgatgtgtttgctcaactaacaggattgaaccatcgttttgaaggagcagttttgaaacactgttttcgtggaatctgcaagtggatatttggctagctttgaggatttcgttggaaaagggattacatataaaaaggagacagcagcattctcagaaacttctttgtgatgtctgcattcaattcacagagttgagcattccctttcatagagcaggttggaaacactctttttgtagtatctggatgaggacatttggagcgctttcaggcgtatggtgaaaaaggaaatatcttccctgtaaaaactagacagaagcattctcagaagtttatttgtgatgtgtgccctcaactaacagagttgaacctttcttttgatagagcagttttgaaacactctttttgtaaaatctgcaagaggatatttggatagctttgaggatttcgttgcaaacgggaatggcttcatataaactctagacagaagcattctcagaaacttcgttgggatgtttcgattgaagtcccagtgttgaacattcccttttatagagcaggttggaaacactctttctgcattccctggaagtggacatttggagcgctttcaggacgacggtgaaaatggaaatatcttccaagaaaatctagatagaagcaatgtcagaaacttttatgtgatggatctactcagctaacagagttgaagctttcttttgagagagcagttttgcaacactctttttgtggaatatgcaagtggatattagggcagctttgaggatttcgttggaaacgggaatacatgtaaaaagcagacagcagcattctcagaaacttctttgtgatgtttgcattgaagtcacagagttgaacattccctttgagagagcaggtttgaaacacgccttttgtcatatctggaagtgtccattcggagcgcattcaggcttgtgttgaaaaaggaaatatcctcccataaaaactagacagaagcattctcagaaacttatctgtgatgtatgtactcaactaaccgaactaaaccatcgttttgaaggagcagttttgaaacactctttttgcggaatctgcaagtggatatttggctagctgggaggatttcgttggaaacgggattacatacaaaaagcagacagcagcattctcagaaacttctttgtgatgtttgcattcaagtcacagagttgaacattccctttcatagagcaggtttgaaacactctttttgtagtatctggatgtggacatttggatcgctttcaggcctatggtgaaaaaggaaatatcttcccatgaaaactagacagaagcattctcagaaacttatttgtgatgtgtgccctcaactgacagtgttgaacctttgttttgatagagcagttctgaaacacactttttgtaaaatctgcaagaggatatttggatagctttgaggatttcgttggaaacgggaatgtcttcatgtaaactctggacagaagcattctcagaaactgctttgggatgtttcaattgaagtcccagtgttgaacattcccattcatagagcaggtttgaaacactctttttgtactatctggaagtggacatttggagcgctttcaggtctacggtgaaaaagtagatatcttccaataaaaactagatagaagcaatgtcagaacttttttcatgatgtatctactcagcaaacagagttgaacctttcttttgagagagcagttttgaaacactctttttgtggaatatgcaagtgggtattaggccagcttggaggatttcgttggaaacgggaatacgtataaaaagcagacagcagcattgtcagaaactactttgtgatgtttgcattcaagtcacagaattgaacactccctttcacagagcaggtttgaaacactctttttgtagtgtctgtaagtgaacatttggattgctttcaggcctaaggtgaaaaaggaaatatcttcccataaaaactagacagaagcattctcagaaacttgtttgtgatgtgtgccctctactgacagagttgaacctttctttgcaaagagcagttttgaaacactctttttgtagaatctgcaagaggatatttggatagctttgaggatttcttgggaaacgggaatgtcttcagataaactctagacagaagcattctcagaaacttctttgggatgtttcaattgaagtcacagtgttgaacattccctttcacagagcaggtttgaaacactctttttgtagtgtctataagtgaacatttggcgtgctttcaggcgtaacgtgaaaaaggaaatatcttcccataaaaactagacagaagcattctcagaaacttgttcttgatgtgtcccctctactgacagagttgaacctttctttgcaaagagcagctttgaaacactctttttgtagaatctgcaagaggatatttggatagcttggaggatttcgttggaaacgggtatgtcttcagataaactcctagacagaagcattctcagaaacttctttgggatgttgcattcaagtcacagagtagaacattcccattcatagagcagatttgaaacactctttttgtagtatctggaagtggacatttggagcgctttcaggcctatgttgaaaaaggaaatatcttcccataaaaactagacggaagcattctcagaaacttatttgtgatgtgtttgctcaactaacaggattgaaccatcgttttgaaggagcagttttgaaacactgttttcgtggaatctgcaagtggatatttggctagctttgaggatttcgttggaaacgggattacatatacaaaggagacagcagcattctcagaaacttctttgtgatgtctgcattcaattcacagagttgagcattccctttcatagagcaggttggaaacactctttttgtagtatctggatgaggacatttggagcgctttcaggcatatggtgaaaaaggaaatatcttcccgtaaaaactagacagaagcattctcagaaatttatttgtgatgtgtgccctcaactaacagagttgaacctttcttttgatagagcagttttgaaacactctttttgtaaaatctgcaagaggatatttggatagctttgaggatttcgttgcaaacgggaatggcttcatataaactctagacagaagcattctcagaaacttcgttgggatgtttcgattgaagtcccagtgttgaacattcccttttatagagcaggttggaaacactctttttgcattccctggaagtggacatttggagcgctttcaggacgacggtgaaaatggaaatatcttccaataaaatctagatagaagcaacgtcagaaacttttctgtgatggatctactcagctaacagagttgaacctttcttttgagagagcagttttgcaacactctttttgtggaatatgcaagtggatattagggcagctttgaggatttcgttggaaacgggaatacatgtaaaaagcagacagcagcattctcagaaacttctttgtgatgtttgcattgaagtcacagagttgaacattccctttcagagagcaggtttgaaacacgccttttgtcatatctggaagtgtccattcggagcgcattcaggcttgtgttgaaaaaggaaatatcctcccataaaaactagacagaagcattctcagaaacttatctgtgatgtatgtactcaactaacagaactaaaccatcgttttgaagggcagttttgaaacactctttttgcggaatctgcaagtggatatttggctagctgggaggatttcgttggaaacgggattacatacaaaaagcagacagcagcattctcagaaacttatttgtgatgtgtgccctcaactgacagtgttgaacctttgttttgatagagcagttctgaaacacactttttgtaaaatctgcaagaggatatttggatagctttgaggatttcgttggaaacgggaatgtcttcatgtaaactctagacagaagcattctcagaaactgctttgggatgtttcaattgaagtcccagtgttgaacattcccattcatagagcaggtttgaaacactctttttgtactatctggaagtggacatttggagcgctttcaggtctacggtgaaaaaggagatatcttccaataaaaactagatagaagcaatgtcagaacttttttcatgatgtatctactcagcaaacagagttgaacctttcttttgagagagcagttttgaaacactctttttgtggaatatgcaagtgggtattaggccagcttggaggatttcgttggaaacgggaatacgtataaaaagcagacagcagcattgtcagaaactactttgtgatgtttgcattcaagtcacagaattgaacactccctttcacagagcaggtttgaaacactctttttgtagtgtctgtaagtgaacatttggattgctttcaggcgtaaggtgaaaaaggaaatatcttcccataaaaactagacagaagcattctcagaaacttgtttgtgatgtgtgccctctactgacagagttgaacctttctttgcaaagagcagttttgaaacactctttttgtagaatctgcaagaggatatttggatagctttgaggatttcttgggaaacgggaatgtcttcagataaactctagacagaagcattctcagaaacttctttgggatgtttcaattgaagtcacagtgttgaacattccctttcacagagcaggtttgaaacactctttttgtagtgtctataagtgaacatttggcgtgctttcaggcctaaggtgaaaaaggaaatatcttcccataaaaactagacagaagcattctcagaaacttgttcgtgatgtgtgccctctactgacagagttgaacctttctttgcaaagagcagctttgaaacactctttttgtagaatctgcaagaggatatttggatagctttgaggatttcgttggaaacgggtatgtcttcagataaactctagacagaaacattctcagaaacttctttgggatgttgcattcaagtcacagagtagaacattcccatgcatagagcagatttgaaacactctttttgtagtatctggaagtggacatttggagcgctttcaggcctatgttgaaaaaggaaatatcttcccataaaaactagacgggaagcattctcagaaacttacttgtgatgtgtttgctcaactaacagaattgaaccatcgttttgaaggagcagttttgaaacactgttttcgtggaatctgcaagtggatatttggctagctttgaggatttcgttggaaacgggattacatatacaaaggagacagcagcattctcagaaacttctttgtgctgtctgcattcaagtcacagagttgagcattccctttcatagagcaggttggaaacactctttttgtagtatctggatgaggacatttggagcgctttcaggcgtatggtgaaaaaggaaatatcttcccgtaaaaactagacagaagcattctcagaaatttatttgtgatgtgtgccctcaactaacagagttgaacctttcttttgatagagcagttttgaaacactctttttgtaaaatctgcaagaggatatttggatagctttgaggatttcattgcaaacgggaatggcttcatataaactctagacagaagcattctcagaaacttcgttgggatgtttcgattgaagacccagtgttgaacattcccttttatagagcaggttggaaacactctttctgcattccctggaagtggacatttggagcgctttcaggacgacggtgaaaatggaaatatcttccaataaaatctagatagaagcaacgtcagaaacttttctgtgatggatctactcagctaacagagttgaacctttcttttgagagagcagttttgcaacactctttttgtggaatatgcaagtggatattagggcagctttgaggatttcgttggaaacgggaatacatgtaaaaagcagacagcagcattctcagaaacttctttgtgatgtttgcattgaagtcacagagttgaacattccctttgaaagagcaggtttgaaacacgccttttgtcatatctggaagtgtccattcggagcgcattcaggcttgtgttgaaaaaggaaatatcctcccataaaaactagacagaagcattctcagaaacttatctgtgatgtatgtactcaactaacagaactaaaccatcgttttgaaggagcagttttgaaacactctttttgcggaatctgcaagtggatatttggctagctgggaggatttcgttggaaacgggattacatacaaaaagcagacagcagcattctcagaaacttctttgtgatgtttgcattcaagtcacagagttgaacattccctttcatagagcaggtttgaaacactctttttgtagtatctggatgtggacatttggatcgctttcaggcctatggtgaaaaaggaaatatcttcccatgaaaactagacagaagcattctcagaaacttatttgtgatgtgtgccctcaactgacagtgttgaacctttgttttgatagagcagttctgaaacacactttttgtaaaatctgcaagaggatatttggatagctctgaggatttcgttggaaacgggagtgtcttcatgtaaactctagacagaagcattctcagaaacagctttgggatgtttcaattgaagtcccagtgttgaacattcccattcatagagcaggtttgaaacactctttttgtactatctggaagtggacatttggagcgctttcaggtctacggtgaaaaaggagatatcttccaataaaaactagatagaagcaatgtcagaacttttttcatgatgtatctactcagcaaacagagttgaacctttcttttgagagagcagttttgaaacactctttttgtggaatatgcaagtgggtattaggccagcttggaggatttcgttggaaacgggaatacgtataaaaagcagacagcagcattgtcagaaactactttgtgatgtttgcattcaagtcacagaattgaacactccctttcacagagcaggtttgaaacactctttttgtagtgtctgtaagtgaacatttggattgctttcaggcctaaggtgaaaaaggaaatatcttcccataaaaactagacagaagcattctcagaaacttgtttgtgatgtgtgccctctactgacagagttgaacctttctttgcaaagagcagttttgaaacactctttttgtagaatctgcaagaggatatttggatagctttgaggatttcttgggaaacgggaatgtcttcagataaactctagacagaagcattctcagaaagttctttgggatgtttcaattgaagtcacagtgttgaacattccctttcacagagcaggtttgaaacactctttttgtagtgtctataagtgaacatttggcgtgctttcaggcctaacgtgaaaaaggaaatatcttcccataaaaactagacagaagcattctcagaaacttgttcgtgatgtgtgccctctactgacagagttgaacctttctttgcaaagagcagctttgaaacacactttttgtagaatctgcaagaggatatttggatagcttggaggatttcgttggaaacgggtatgtcttcagataaactctagacagaagcattctcagaaacttctttgggatgttgcattcaagtcacagagtagaacattcccattcatagagcagatttgaaacactctttttgtagtatctggaagtggacatttggagcgctttcaggcctatgttgaaaaaggaaatatcttcccataaaaactagacggaagcattctcagaaacttatttgtgatgtgtttgctcaactaacaggattgaaccatcgttttgaaggagcagttttgaaacactgttttcgtggaatctgcaagtggatatttggctagctttgaggatttcgttggaaacgggattacatataaaaaggagacagcagcattctcagaaacttctttgtgatgtctgcattcaattcacagagttgagcattccctttcatagagcaggttggaaacactctttttgtagtatctggatgaggacatttggagcgcttcaggcgtatggtgaaaaaggaaatatcttcccgtaaaaactagacagaagcattctcagaagtttatttgtgatgtgtgccctcaactaacagagttgaacctttcttttgatagagcagttttgaaacactctttttgtaaaatctgcaagaggatatttggatagctttgaggatttcgttgcaaacgggaatggcttcatataaactctagacagaagcattctcagaaacttcgttgggatgtttcgattgaagtcccagtgttgaacattcccttttatagagcaggttggaaacactctttctgcattccctggaagtggacatttggagcgctttcaggacgacggtgaaaatggaaatatcttccaagaaaatctagatagaagcaatgtcagaaacttttatgtgatggatctactcagctaacagagttgaacctttcttttgagagagcagttttgcaacactctttttgtggaatatgcaagtggatattagggcagctttgaggatttcgttggaaacgggaatacatgtaaaaagcagacagcagcattctcagaaacttctttgtgatgtttgcattgaagtcacagagttgaacattccctttgagagagcaggtttgaaacacgccttttgtcatatctggaagtgtccattcggagcgcattcaggcttgtgttgaaaaaggaaatatcctcccataaaaactagacagaagcattctcagaaacttatctgtgatgtatgtactcaactaacagaactaaaccatcgttttgaaggagcagttttgaaacactctttttgcggaatctgcaagtggatacttggctagcttggaggatttcgttggaaacgggattacatacaaaaagcagagagcagcattctcagaaacttctttgtgatgtttgcattcaagtcacagagttgaacattccctttcatagagcaggtttgaaacactctttttgtagtatctggatgtggacatttggatcgctttcaggcctatggtgaaaaaggaaatatcttcccatgaaaactagacagaagcattctcagaaacttatttgtgatgtgtgccctcaactgacagtgttgaacctttgttttgatagagcagttctgaaacacactttttgtaaaatctgcaagaggatatttggatagctttgaggatttcgttggaaacgggaatgtcttcatgtaaactctagacagaagcattctcagaaactgctttgggatgtttcaattgaagtcccagtgttgaacattccctttcatagagcaggtttgaaacactctttttgtactatctggaagtggacatttggagcgctttcaggtctacggtgaaaaaggagatatcttccaataaaaactagatagaaagcaatgtcagaacttttttcatgatgtatctactcagcaaacagagttgaacctttcttttgagagagcagttttgaaacactccttttgtggaatatgcaagtgggtattaggccagcttggaggatttcgttggaaacgggaatacgtataaaaagcagacagcagcattgtcagaaactactttgtgatgtttgcattcaagtcacagaattgaacactccctttcacagagcaggtttgaaacactctttttgtagtgtctgtaagtgaacatatggattgctttcaggcctaaggtgaaaaaggaaatatcttcccataaaaactagacagaagcattctcagaaacttgtttgtgatgtgtgccctctactgacagagttgaacctttctttgcaaagagcagttttgaaacactctttttgtagaatctgcaagaggatatttggatagctttgaagatttcttgggaaacgggaatgtcttcagataaactctagacagaagcattctcagaaacttctttgggatgtttcaattgaagtcacagtgttgaacattccctttcacagagcaggtttgaaacactctttttgtagtgtctataagtgaacatttcgcgtgctttcaggcctaacgtgaaaaaggaaatatcttcccataaaaactagacagaagcattctcagaaacttgttcatgatgtgtgccctctactgacagagttgaacctttctttgcaaagagcagctttgaaacactctttttgtagaatctgcaagaggatatttggatagcttggaggatttcgttggaaacgggtatgtcttcagataaactctagacagaagcattctcagaaacttctttgggatgttgcattcaagtcacagagtagaacattcccattcatagagcagatttgaaacactctttttgtagtatctggaagtggacatttggagcgctttcaggcctatgttgaaaaaggaaatatcttcccataaaaactagacggaagcattctcagaaacttatttgtgatgtgtttgctcaactaacaggattgaaccatcgttttgaaggagcagttttgaaacactgttttcgtggaatctgcaagtggatatttggctagctttgaggatttcgttggaaacgggattacatataaaaaggagacagcagcattctcagaaacatctctgtgatgtttgcattcaagtcacagagttgaacattccctttcatagagcaggtttgaaacactgtttttgtagtatctggaagtgcacatttggagcgcattgaggcctaaggtgaaaaaggaaatatcttcccataaaaactagacagaagcattctcagaagtttatttgtgatgtgtgccctcaactaacagagttgaaactttcttttgatagagcagttttgaaacactcattttgtaaaatctgcaagaggatatttggatagctttgaggattttgttgcaaacgggaatggcttcatataaactctagacagaagcattctcagaaacttcgtcgggatgtttcgattgaagtcccagtgttgaacattcccttttatagagcaggttggaaacactctttctgcattccctggaagtggacaattggagcgctttcaggacgacggtgaaaatggaaatatcttccaataaaatctggatagaagcaatgtcagaaacttttctgtgatggatctactcagctaacagagttgaacctttcttttgagagagcagttttgcaacactctttttgtggaatatgcaagtggatattagggcagctttgaggatttcgttggaaacgggaatacatgtaaaaagcagacagcagcattctcagaaacttctttgtgatgtttgcattcaagtcacagagttgaacattccctttgagagagcaggtttgaaacacgccttttgtcatatctggaagtgtccattcggagcgcattcaggcttgtgttgaaaaaggaaatatcctcccataaaaactagacagaagcattctcagaaacttatctgtgatgtatgtactcaactaacagaactaaaccatcgttttgaaggagcagttttgaaacactctttttgcggaatctgcaagtggatatttggctagctgggaggatttcgttggaaacgggattacatacaaaaagcagacagcagcattctcagaaacttctttgtgatgtttgcattcaagtcacagagttgagcattccctttcatagagcaggttggaaacactctttttgtagtatctggatgtggacatttggatcgctttcaggcgtatggtgaaaaaggaaatatcttcccatgaaaactagacagaagcattctcagaaacttatttgtgatgtgtgcactcaactgacagtgttgaacctttgttttgatagagcagttctgaaacacactttttgtaaaatctgcaagaggatatttggatagctttgaggatttcgttggaaacgggaatgtcttcatgtaaactctagacagaagcattctcagaaactgctttgggatgtttcaattgaagtcccagtgttgaacattcccattcatagagcaggtttgaaacactctttttgtactatctggaagtggacatttggagcgctttcaggtctacggtgaaaaaggagatatcttccaataaaaactagatagaagcaatgtcagaacttttttcatgatgtatctactcagcaaacagagttgaacctttcttttgagagagcagttttgaaacactctttttgtggaatatgaaagtgggtattaggccagcttggaggatttcgttggaaacgggaatacgtataaaaagcagacagcagcattgtcagaaactactttgtgatgtttgcattcaagtcacagaactgaaaactccctttcacagagcaggtttgaaacactctttttgtagtgtctgtaagtgaacatttggattgctttcaggcctaaggtgaaaaaggaaatatcttcccataaaaactagacagaagcattctcagaaacttgttcgtgatgtgtgccctctactgacagagttgaacctttctttgcaaagagcagttttgaaacactctttttgtagaatctgcaagaggatatttggatagctttgaagatttcttgggaaacgggaatgtcttcagataaactctagacagaagcattctcagaaacttctttgggatgtttcaattgaagtcacagtgttgaacattccctttcacagagcaggtttcaaacactctttttgtagtgtctataagtgaacatttggcgtgctttcaggcctaacgtgaaaaaggaaatatcttcccataaaaactagacagaagcattctcagaaacttgttcgtgatgtgtgccctctactgacagagttgaacctttctttgcaaagagcagctttgtaacacactttttgtagaatctgcaagaggatatttggatagctttgaggatttcgttggaaacgggtatgtcttctgataaactctagacagaagcattctcagaaacttctttgggatgttgcatgcaagtcacagagtagaacattcccattcataaatcagatttgaaacactctttttgtagtatctggaagtggacatttggagcgctttcaggcctatgttgaaaaaggaaatatcttcccataaaaactagacggaagcattctcagaaacttatttgtgatgtgtttgctcaactaacaggattgaaccatcgttttgaaggagcagttttgaaacactgttttcgtggaatctgcaagtggatatttggctagctttgaggatttcgttggaaacgggattacatataaaaaggagacagcagcattctcagaaacttctttgtgatgtctgcattcaattcacagagttgagcattccctttcatagagcaggttggaaacactctttttgtagtatctggatgtggacatttggatcgctttcaggcctatggtgaaaaaggaaatatcttcccatgaaaactagacagaagcattctcagaaacttatttgtgatgtgtgccctcaactgacagtgttgaacctttgttttgatagagcagttctgaaacacactttttgtaaaatctgcaagaggatatttggatagctttgaggatttcgttggaaacgggaatgtcttcatgtaaactctagacagaagcattctcagaaactgctttgggatgtttcaattgaagtcccagtgttgaacattcccattcatagagcaggtttgaaacactctttttgtactatctggaagtggacatttggagcgctttcaggtctatggtgaaaaaggagatatcttccaataaaaactagatagaagcaatgtcagaacttttttcatgatgtatctactcagcaaacagagttgaacctttcttttgagagagcagttttgaaacactctttttgtggaatatgcaagtgggtattaggccagcttggaggatttcgttggaaacgggaatacgtataaaaagcagacagcagcattgtcagaaactactttgtgatgtttgcattcaagtcacagaattgaacactccctttcacagagcaggtttgaaacactctttttgtagtgtctgtaagtgaacatatggattgctttcaggtctaaggtgaaaaaggaaatatcttcccataaaaactagacagaaagcattctcagcaaacttgtttgtgatgtgtgccctctactgacagagttgaacctttctttgcaaagagcagttttgaaacactctttttgtagaatctgcaagaggatatttggatagctttgaggatttcttgggaaacgggaatgtcttcagataaactctagacagaagcattctcagaaacttctttgggatgtttcaattgaagtcacagtgttgaacattccctttcacagagcaggtttgaaacactctttttgtagtgtctataagtgaacatttggcgtgctttcaggcctaacgtgaaaaaggaaatatcttcccataaaaactagacagaagcattctcagaaacttgttcgtgatgtgtgccctctactgacagagttgaacctttctttgcaaagagcagctttgaaacacactttttgtagaatctgcaagaggatatttggatagctttgtggatttcgttggaaacgggtatgtcttcagataaactctagacagaagcattctcagaaacttctttgggatgttgcattcaagtcacagagtagaacattcccattcatagagcagatttgaaacactctttttgtagtatctggaagtggacatttggagcgctttcaggcctatgttgaaaaaggaaatatcttcccataaaaactagacagaagcattctcagaaacttacttgtgatgtgtttgctcaactaacagaattgaaccatcgttttgaaggagcagttttgaaacactgttttcgtggaatctgcaagtggatatttggctagctttgaggatttcgttggaaacgggattacatataaaaaggagacagcagcattctcagaaacttctttgtgatgtctgcattcaagtcacagagttgagcattccctttcatagagcaggttggaaacactctttttgtagtatctgcatgaggacatttggagcgctttcaggcgtatggtgaaaaaggaaatatcttcccgtaaaaactagacagaagcattctcagaaatttatttgtgatgtgtgccctcaactaacagagttgaacctttcttttgatagagcagttttgaaacactctttttgtaaaatctgcaagaggatatttggatagctttgaggatttcattgcaaacgggaatggcttcatataaactctagacagaagcattctcagaaacttcgttgggatgtttcgattgaagtcccagtgttgaacattcccttttatagagcaggttggaaacactctttctgcattccctggaagtggacatttggagagctttcaggacgacggtgaaaatggaaatatcttccaagaaaatctagatagaagcaatgtcagaaacttttatgtgatggatctactcagctaacagagttgaagctttcttttgagagagcagttttgcaacactctttttgtggaatatgcaagtggatattagggcagctttgaggatttcgttggaaacgggaatacatgtaaaaagcagacagcagcattctcagaatcttctttgtgatgtttgcattgaagtcacagagttgaacattccctttgagagagcagggttgaaacacgccttttgtcatatctggaagtgtccattcggagcgcatacaggcttgcgatgaaaaaggaaatatcctcccataaaaactagacagaagcattctcagaaacctatttgtgatgtatgtactcaactaacagaactaaaccatcgttttgaaggagcagttttgaaacactctttttgcggaatctgcaactggatatttggctagcttggaggatttcgttggaaacgggattacatacaaaaagcagacagcagcattctcagaaacttctttgtgatgtttgcattcaagtcgcagagttgaacattccctttcatagagcaggtttgaaacactctttttgtagtatctggatgtggacatttggatcgctttcaggcctatggtgaaaaaggaaatatcttcccatgaaaactagacagaagcattctcagaaacttatttgtgatgtgtgccctcaactgacagtgttgaacctttgttttgatagagcagttctgaaacacactttttgtaaaatctgcaagaggatatttggatagctttgaggatttcgttggaaacgggaatgtcttcatgtaaactctagacagaagcattctcagaaactgctttgggatgtttcaattgaagtcccagtgttgaacattccctttcatagagcaggtttgaaacactctttttgtactatctggaagtggacatttggagcgctttcaggtctacggtgaaaaaggagatatcttccaataaaaactagatagaagcaatgtcagaacttttttcatgatgtatctactcagcaaacagagttgaacctttcttttgagagagcagttttgaaacactctttttgtggaatatgcaagtgggtattaggccagcttggaggatttcgttggaaacgggaatacgtataaaaagcagacagcagcattgtcagaaactactttgtgatgtttgcattcaagtcacagaattgaacactccctttcacagagcaggtttgaaacactctttttgtagtgtctgtaagtgaacatttggattgctttcaggcctaaggtgaaaaaggaaatatcttcccataaaaactagacagaagcattctcagaaacttgtttgtgatgtgtgccctctactgacagagttgaacctttctttgcaaagagcagttttgaaacactctttttgtagaatctgcaagaggatatttggatagctttgaggatttcatgggaaacgggaatgtcttcagataaactctagacagaagcattctcagaaacttctttgggatgtttcaattgaagtcacagtgttgaacattccctttcacagagcaggttttaaacactctttttgtagtgtctataattgaacatttggcgtgctttcaggcctaacgtgaaaaaggaaatatcttcccataaaaactagacagaagcattctcagaaacttgttcgtgatgtgtgccctctactgacagagttgaacctttctttgcaaagagcagctttgaaacactctttttgtagaatctgcaagaggatatgtggatagctttgaggatttcgttggaaacgggtatgtcttcagataaactctagacagaagcattctcagaaacttctttgggatgtttcaattgaagtcacagtgttgaacattccctttcacagagcaggtttgaaacactctttttgtagtgtctataagtgaacatttggcgtgctttcaggcctaacgtgaaaaaggaaatatcttcccataaaaactagacagaagcattctcagaaacttgttcatgatgtgtgccctctactgacagagttgaacctttctttgcaaagagcagctttgaaacactctttttgtagaatctgcaagaggatatttggatagctttgaggatttcgttggaaacgggtatgtcttcagataaactctagacagaaacattctcagaaacttctttgggatgttgcattcaagtcacagagtagaacattcccatgcatagagcagatttgaaacactctttttgtagtatctggaagtggacatttggagcgctttcaggcctatgttgaaaaaggaaatatcttcccataaaaactagacgggaagcattctcagaaacttacttgtgatgtgtttgctcaactaacagaattgaaccatcgttttgaaggagcagttttgaaacactgttttcgtggaatctgcaagtggatatttggctagctttgaggatttcgttggaaacgggattacatataaaaaggagacagcagcattctcagaaacttctttgtgatgtctgcattcaattcacagagttgagcattccctttcctagagcacgttggaaacactctttttgtagtatctggatgaggacatttggagcgctttcaggcgtatggtgaaaaaggaaatatcttcccgtaaaaactagacagaagcattctcagaaatttatttgtgatgtgtgccctcaactaacagagttgaacctttcttttgatagagcagttttgaaacactctttttgtaaaatctgcaagaggatatttggatagctttgaggatttcattgcaaacgggaatggcttcatataaactctagacagaagcattctcagaaacttcgttgggatgtttcgattgaagtcccagtgttgaacattcccttttatagagcaggttggaaacactctttctgcatttcctggaagtggacatttggagcgctttcaggacgacggtgaaaatggaaatatcttccaagaaaatctagatagaagcaacgtcagaaacttttatgtgatggatctactcagctaacagagttgaacctttcttttgagagagcagttttgcaacactctttttgtggaatatgcaagtggatattagggcagctttgaggatttcgttggaaacgggaatacatgtaaaaagcagacagcagcattctcagaaacttctttgtgatgtttgcattgaagtcacagagttgaacattccctttgagagagcaggtttgaaacacgccttttgtcatatctggaagtgtccattcggagcgcattcaggcttgtgttgaaaaaggaaatatcctcccataaaaactaggacggaagcattctcagaaacttatctgtgatgtatgtactcaactaacagaactaaaccatcgttttgaaggagcagttttgaaacactctttttgcggaatctgcaagtggatatttggctagctgggaggatttcgttggaaacgggattacatacaaaaagcagacagcagcattctcagaaacttctttgtgatgtttgcattcaagtcacagagttgaacattccctttcatagagcaggtttgaaacactctttttgtagtatctggatgtggacatttggatcgctttcaggcctatggtgaaaaaggaaatatcttcccatgaaaactagacagaagcattctcagaaacttatttgtgatgtgtgccctcaactgacagtgttgaacctttgttttgatagagcagttctgaaacacactttttgtaaaatctgcaagaggatatttggatagctttgaggatttcgttggaaacgggaatgtcttcatgtaaactctacacagaagcattctcagaaactgctttgggatgtttcaattgaagtcccagtgttgaacattcccattcatagagcaggttggaaacactctttttgtactatctggaagtggacatttggagcgctttcaggtctacggtgaaaaaggagatatcttccaataaaaactagatagaagcaatgtcagaacttttttcatgatgtatctactcagcaaacagagttgaacctttcttttgagagagcagttttgaaacactctttttgtggaatatgcaagtgggtattaggccagcttggaggatttcgttggaaacgggaatacgtataaaaagcagacagcagcattgtcagaaactactttgtgatgtttgcattcaagtcacagaattgaacactccctttcacagagcaggtttgaaacactctttttgtagtgtctataagtgaacatttggcgtgctttcaggcctaaggtgaaaaaggaaatatcttcccataaaaactagacagaagcattctcagaaacttgtttgtgatgtgtgccctctactgacagagttgaacctttctttgcaaagagcagctttgaaacactctttttgtagaatctgcaagaggatatgtggatagctttgaggatttcgttggaaacgggtatgtcttcagataaactctagacagaagcattctcagaaacttctttgggatgttgcattcaagtcacagagtagaacattcccattcatagagcagatttgaaacactctttttgtagtatctggaagtggacatttggagcgctttcaggcctatgttgaaaaaggaaatatcttcccataaaaactagacggaagcattctcagaaacttatttgtgatgtgtttgctcaactaacaggattgaaccatcgttttgaaggagcagttttgaaacactgttttcgtggaatctgcaagtggatatttggctagctttgaggatttcgttggaaacgggattacatataaaaaggagacagcagcattctcagaaacttctttgtgatgtctgcattcaattcacagagttgagcattccctttcatagagcaggttggaaacactctttttgtagtatctggatgaggacatttggagcgctttcaggcgtatggtgaaaaaggaaatatcttcccgtaaaaactagacagaagcattctcagaagtttatttgtgatgtgtgccctcaactaacagagttgaacctttcttttgatagagcagttttgaaacactctttttgtaaaatctgcaagaggatatttggatagctttgaggatttcgttgcaaacgggaatggcttcatataaactctagacagaagcattctcagaaacttcgttgggatgtttcgattgaagtcccagtgttgaacattcccttttatagagcaggttggaaacactctttctgcattccctggaagtggacatttggagcgctttcaggacgacggtgaaaatggaaatatcttccaagaaaatctagatagaagcaatgtcagaaacttttatgtgatggatctactcagctaacagagttgaagctttcttttgagagagcagttttgcaacactctttttgtggaatatgcaagtggatattagggcagctttgaggatttcgttggaaacgggaatacatgtaaaaagcagacagcagcattctcagaaacttctttgtgatgtttacattgaagtcacagagttgaacattccctttgagagagcaggtttgaaacacgccttttgtcatatctggaagtgtccattcggagcgcatacaggcttgtgttgaaaaaggaaatatcctcccataaaaactagacagaagcattctcagaaacctatttgtgatgtatgtactcaactaacagaactaaaccatcgttttgaaggagcagttttgaaacactctttttgcggaatctgcaactggatatttggctagcttggaggatttcgttggaaacgggattacataaaaaagcagacagcagcattctcagaaacttctttgtgatgtttgcattcaagtcgcagagttgaacattccctttcatagagcaggtttgaaacactctttttgtagtatctggatgtggacatttggatcgctttcaggcctatggtgaaaaaggaaatatcttcccatgaaaactagacagaagcattctcagaaacttatttgtgatgtgtgccctcaactgacagtgttgaacctttgttttgatagagcagttctgaaacacactttttgtaaaatctgcaagaggatatttggatagctttgaggatttcgttggaaacgggaatgtcttcatgtaaactctagacagaagcattctcagaaactgctttgggatgtttcaattgaagtcccagtgttgaacattccctttcatagagcaggtttgaaacactctttttgtagtatctggaagtggacatttggagcgctttcaggtctacggtgaaaaaggagatatcttccaataaaaactagatagaagcaatgtcagaacttttttcatgatgtatctactcagcaaacagagttgaacctttcttttgagagagcagttttgaaacactctttttgtggaatatgcaagtgggtattaggccggcttggaggatttcgttggaaacgggaatacgtataaaaagcagacagcagcattgtcagaaactactttgtgatgtttgcattcaagtcacagaattgaacactccctttcacagagcaggttcgaaacactctttttgtagtgtctgtaagtgaacatttggattgcttacaggcctaaggtgaaaaaggaaatatcttcccataaaaactagacagaagcattctcagaaacttgtttgtgatgtgtgccctctactgacagagttgaacctttctttgcaaagagcagttttgaaacactctttttgtagaatctgcaagaggatatttggatagctttgaggatttcttgggaaacgggaatgtcttcagataaactctagacagaagcattctcagaaacttctttgggatgtttcaattgaagtcacagtgttgaacattccctttcacagagcaggtttgaaacactctttttgtagtgtctataagtgaacatttggcgtgctttcaggcgtaacgtgaaaaaggaaatatcttcccataaaaactagacagaagcattctcagaaacttgttcgtgatgtgtgccctctactgacagagttgaacctttctttgcaaagagcagctttgaaacacactttttgtagaatctgcaagaggatatttggatagcttggaggatttcgttggaaacgggtatgtcttcagataaactctagacagaagcattctcagaaacttctttgggatgttgcattcaagtcacagagtagaacattcccattcatagagcagatttgaaacactctttttgtagtatctggaagtggacatttggagcgctttcaggcctatgttgaaaaaggaaatatcttcccataaaaactagacggaagcattctcagaaacttatttgtgatgtgtttgctcaactaacaggattgaaccatcgttttgaaggagcagttttgaaacactgttttcgtggaatctgcaagtggatatttggctagctttgaggatttcgttggaaacgggattacatataaaaaggagacagcagcattctgagaaacttctttgtgatgtctgcattcaattcacagagttgagcattccctttcatagagcaggttggaaacactctttttgtagtatctggatgaggacatttggagcgctttcaggcgtatggtgaaaaaggaaatatcttcccgtaaaaactagacagaagcattctcagaagtttatttgtgatgtgtgccctcaactaacagagttgaacctttcttttgatagagcagttttgaaacactctttttgtaaaatctgcaagaggatatttggatagctttgaggatttcgttgcaaacgggaatggcttcatataaactctagacagaagcattctcagaaacttcgttgggatgtttcgattgaagtcccagtgttgaacattcccttttatagagcaggttggaaacactctttctgcattccctggaagtggacatttggagcgctttcaggacgacggtgaaaatggaaatatcttccaagaaaatctagatagaagcaatgtcagaaacttttatgtgatggatctactcagctaacagagttgaacctttcttttgagagagcagttttgcaacactctttttgtggaatatgcaagtggatattagggcagctttgaggatttcgttggaaacgggaatacatgtaaaaagcagacagcagcattctcagaaacttctttgtgatgtttgcattgaagtcacagagttgaacattccctttgagagagcaggtttgaaacacgccttttgtcatatctggaagtgtccattcggagcgcattcaggcttgtgttgaaaaaggaaatatcctcccataaaaactagacagaagcattctcagaaacttatctgtgatgtatgtactcaactaacagaactaaaccatcgttttgaaggagcaattttgaaacactctttttgcggaatctgcaagtggatatttggctagctgggaggatttcgttggaaacgggattacatacaaaaagcagacagcagcattctcagaaacttatttgtgatgtgtgccctcaactgacagtgttgaacctttgttttgatagagcagttctgaaacacactttttgtaaaatctgcaagaggatatttggatagctttgaggatttcgttggaaacgggaatgtcttcatgtaaactctacacagaagcattctcagaaactgctttgggatgtttcaattgaagtcccagtgttgaacattcccattcatagagcaggtttgaaacactctttttgtactatctggaagtggacatttggagcgctttcaggtctacggtgaaaaaggagatatcttccaataaaaactagatagaagcaatgtcagaacttttttcatgatgtatctactcagcacacagagttgaacctttcttttgagagagcagttttgaaacactctttttgtggaatatgcaagtgggtattaggccagcttggaggatttcgttggaaacgggaatacgtataaaaagcagacagcagcattgtcagaaactactttgtgatgtttgcattcaagtcacagaattgaacactccctttcacagaacaggtttgaaacactctttttgtagtgtctgtaagtgaacatatggattgctttcaggcctaaggtgaaaaaggaaatatcttcccataaaaactagacagaagcattctcagaaacttgtttgtgatgtgtgccctctactgacagagttgaacctttctttgcaaagagcagttttgaaacactctttttgtagaatctgcaagaggatatttggatagctttgaagatttcttgggaaacgggaatgtcttcagataaactctagacagaagcattctcagaaacttctttgggatgtttcaattgaagtcacagtgttgaacattccctttcacagagcaggtttgaaacactctttttgtagtgtctataagtgaacatttggcgtgctttcaggcctaacgtgaaaaaggaaatatcttcccataaaaactagacagaagcattctcagaaacttgttcatgatgtgtgccctctactgacagagttgaacctttctttgcaaagagcagctttgaaacactctttttgtagaatctgcaagaggatatttggatagctttgaggatttcgttggaaacgggtatgtcttcagataaactctagacagaagcattctcagaaacttctttgggatgttgcattcaagtcacagagtagaacattcccattcatagagcagatttgaaacactctttttgtagtatctggaagtggacatttggagcgctttcaggcctatgttgaaaaaggaaatatcttcccataaaaactagacggaagcattctcagaaacttacttgtgatgtgtttgctcaactaacagaattgaaccatcgttttgaaggagcagttttgaaacactgttttcgtggaatctgcaagtggatatttggctagctttgaggatttcgttggaaacgggattacatataaaaaggagacagcagcattctcagaaacttctttgtgatgtctgcattcaattcacagagttgagcattccctttcatagagcaggttggaaacactctttttgtagtatctggatgaggacatttggagcgctttcaggcgtatggtgaaaaaggaaatatcttcccgtaaaaactagacagaagcattctcagaagtttatttgtgatgtgtgccctcaactaacagagttgaacctttcttttgatagagcagttttgaaacactctttttgtaaaatctgcaagaggatatttggatagctttgaggatttcgttgcaaacgggaatggcttcatataaactctagacagaagcattctcagaaacttcgttgggatgtttcgattgaagtcccagtgttgaacattcccttttatagagcaggttggaaacactctttctgcattccctggaagtggacatttggagcgctttcaggacgacggtgaaaatggaaatatcttccaagaaaatctagatagaagcaatgtcagaaacttttatgtgatggatctactcagctaacagagttgaacctttcttttgagagagcagttttgcaacactctttttgtggaatatgcaagtggatattagggcagctttgaggatttcgttggaaacgggaatacatgtaaaaagcagacagcagcattctcagaaacttctttgtgatgtttgcattgaagtcacagagttgaacattccctttgagagagcaggtttgaaacacgccttttgtcatatctggaagtgtccattcggagcgcattcaggcttgtgttgaaaaaggaaatatcctcccataaaaactagacagaagcattctcagaaacttatctgtgatgtatgtactcaactaacagaactaaaccatcgttttgaaggagcagttttgaaacactctttttgcggaatctgcaagtggatatttggctagctgggaggatttcgttggaaacgggattacatacaaaaagcagacagcagcattctcagaaacttctttgtgatgtttgcattcaagtcacagagttgaacattccctttcatagagcaggtttgaaacactctttttgtagtatctggatgtggacatttggatcgctttcaggcctatggtgaaaaaggaaatatcttcccatgaaaactagacagaagcattctcagaaacttatttgtgatgtgtgccctcaactgacagtgttgaacctttgttttgatagagcagttctgaaacacactttttgtaaaatctgcaagaggatatttggatagctttgaggatttcgttggaaacgggaatgtcttcatgtaaactctacacagaagcattctcagaaactgctttgggatgtttcaattgaagtcccagtgttgaacattcccattcatagagcaggtttgaaacactctttttgtactatctggaagtggacatttggagcgctttcaggtctacggtgaaaaaggagatatcttccaataaaaactagatagaagcaatgtcagaacttttttcatgatgtatctactcagcacacagagttgaacctttcttttgagagagcagttttgaaacactctttttgtggaatatgcaagtgggtattaggccagcttggaggatttcgttggaaacgggaatacgtataaaaagcagacagcagcattgtcagaaactactttgtgatgtttgcattcaagtcacagaattgaacactccctttcacagagcaggtttgaaacactctttttgtagtgtctgtaagtgaacatatggattgctttcaggcctaaggtgaaaaaggaaatatcttcccataaaaactagacagaagcattctcagaaacttgtttgtgatgtgtgccctctactgacagatttgaacctttctttgcaaagagcagttttgaaacactctttttgtagaatctgcaagaggatatttggatagctttgaagatttcttgggaaacgggaatgtcttcagataaactctagacagaagcattctcagaaacttctttgggatgtttcaattgaagtcacagtgttgaacattccctttcacagagcaggtttgaaacactctttttgtagtgtgtataagtgaatatttcgcgtgctttcaggcctaacgtgaaaaaggaaatatcttcccataaaaactagacagaagcattctcagaaacttgtttgtgatgtgtgccctctactgacagagttgaacctttctttgcaaagagcagctttgaaacactctttttgtagaatctgcaagaggatatgtggatagctttgaggatttcgttggaaacgggtatgtcttcagataaactctagacagaagcattctcagaaatttctttgggatgttgcatgcaagtcacagagtagaacattcccattcatagagcagatttgaaacactctttttgtactatctggaagtggacatttggagcgctttcaggcctatgttgaaaaaggaaatatcttcctataaaaactagacggaagcattctcagaaacttaattgtgatgagtttgctcaactaacaggattgaaccatcgttttgaaggagcagttttgaaacactgttttcgtggaatctgcaagtggatatttggctagctttgaggatttcgttggaaacgggattacatataaaaaggagacagcagcattctcagaaacttctttgtgatgtctgcattcaattcacagagttgagcattccctttcatagagcaggttggaaacactctttttgtagtatctggatgaggacatttggagcgctttcaggcgtatggtgaaaagggaaatatcttcccgtaaaaactagacagaagcattctcagaagtttatttgtgatgtgtgccctcaactaacagagttggaccattcttttgatagagcagttttgaaacactctttttgtaaaatctgcaacaggatatttggatagctttgaggatttcgttgcaaacgggaatggcttcatataaactctagacagaagcattctcagaaacttcgttgggatgtttcgattgaagtcccagtgttgaacattcccttttatagagcaggttggaaacactctttctgcattccctggaagtggacatttggagcgctttcaggacgacggtgaaaatggaaatatcttccaagaaaatctagatagaagcaacgtcagaaacttttatgtgatggatctactcagctaacagagttgaacctttcttttgagagagcagttttgcaacactctttttgtggaatatgcaagtggatattagggcagctttgaggatttcgttggaaacgggaatacatgtaaaaagcagacagcagcattctcagaaacttctttgtgatgtttgcattgaagtcacagagttgaacattccctttgagagagcaggtttgaaacacgccttttgtcatatctggaagtgtccattcggagcgcattcaggcttgtgttgaaaaaggaaatatcctcccataaaaactagacagaagcattctcagaaacttatctgtgatgtatgtactcaactaacagaactaaaccatcgttttgaaggagcagttttgaaacactctttttgcggaatctgcaagtggatatttggctagctgggaggatttcgttggaaacgggattacatacaaaaagcagacagcagcattctcagaaacttctttgtgatgtttgcattcaagtcacagagttgaacattccctttcatagagcaggtttgaaacactctttttgtagtatctggatgtggacatttggatcgctttcaggcctatggtgaaaaaggaaatatcttcccatgaaaactagacagaagcattctcagaaacttatttgtgatgtgtgccctcaactgacagtgttgaacctttgttttgatagagcagttctgaaacacactttttgtaaaatctgcaagaggatatttggatagctttgaggatttcgttggaaacgggaatgtcttcatgtaaactctacacagaagcattctcagaaactgctttgggatgtttcaattgaagtcccagtgttgaacattcccattcatagagcaggtttgaaacactctttttgtactatctggaagtggacatttggagcgctttcaggtctacggtgaaaaaggagatatcttccaataaaaactagatagaagcaatgtcagaacttttttcatgatgtatctactcagctaacagagttgaacctttcttttgagagagcagttttgaaacactctttgtgtggaatatgcaagtgggtattaggccagcttggaggatttcgttggaaacgggaatacgtataaaaagcagacagcagcattgtcagaaactactttgtgatgtttgcattcaagtcacagaattgaacactccctttcacagagcaggtttgaaacactctttttgtagtgtctgtaagtgaacatatggattgctttcaggcctaaggtgaaaaaggaaatatcttcccataaaaactagacagaagcattctcagaaacttgtttgtgatgtgtgccctctactgacagagttgaacctttctttgcaaagagcagttttgaaacactctttttgtagaatctgcaagaggatatttggatagctttgaggatttcttgggaaacgggaatgtcttcagataaactctagacagaagcattctcagaaacttctttgggatgtttcaattgaagtcacagtgttgaacattccctttcacaggagcaggtttgaaacactctttttgtagtgtctataagtgaacatttggcgtgctttcaggcctaacgtgaaaaaggaaatatcttcccataaaaactagacagaagcattctcagaaacttgtttgtgatgtgtgccctctactgacagagttgaacctttccttgcaaagagcagctttgaaacactctttttgtagaatctgcaagaggatatttggatagctttgaggatttcgttggaaactggtatgtcttcagataaactctagacagaagcattctcagaaacttctttgggatgttgcattcaagtcacagagtagaacatttccattcatagagcagatttgaaacactctttttgtagtatctggaagtggacatttggagcgctttcaggcctatgttgaaaaaggaaatatcttcccataaaaactagacggaagcattctcagaaacttaattgtgatgtgtttgctcaactaacaggattgaaccatcgttttgaaggagcagttttgaaacactgttttcgtggaatctgcaagtggatatttggctagctttgaggatttcgttggaaacgggattacatataaaaaggagacagcagcattctcagaaacttctttgtgatgtctgcattcaattcacagagttgagcattccctttcatagagcaggttggaaacactctttttgtagtatctggatgtggacatttggatcgctttcaggcctatggtgaaaaaggaaatatcttcccatgaaaactagacagaagcattctcagaaacttatttgtgatgtgtgcactcaactgacagtgttgaacctttgttttgatagagcagttctgaaacacaatttttgtaaaatctgcaagaggatatttggatagctttgaggatttcgttggaaacgggaatgtcttcatgtaaactctagacagaagcattctcagaaactgctttgggatgtttcaattgaattcccagtgttgaacattcccattcatagagcaggtttgaaacactctttttctactatctggaagtggacatttggagcgctttcaggtctacggtgaaaaaggagatatcttacaataaaaactagatagaagcaatgtcagaacttttttcatgatgtatctactcagcaaacagagttgaacctttcttttgagagagcagttttgacactgtctttgtggaatatgcaagtgggtattaggccagcttggaggatttcgttggaaacgggaatacgtataaaaagcagacagcagcattgtcagaaactactttgtgatgtttgcattcaagtcacagaattgaacactccctttcacagagcaggtttgaaacactctttttgtagtgtctgtaagtgaacatttgcattgctttcaggcctaaggtgaaaaaggaaatatcttcccataaaaactagacagaagcattctcagaaacttgtttgtgatgtgtgccctctactgacagagttgaacctttctttgcaaagagcagttttgaaacactctttttgtagaatctgcaagaggatatttggatagctttgaggatttcttgggaaacgggaatgtcttcagataaactctagacagaagcattctcagaaacttctttgggatgtttcaattgaagtcacagtgttgaacattccctttcacagagcaggtttcaaacactctttttgtagtgtctataagtgaacatttggcgtgctttcaggcctaacgtgaaaaaggaaatatcttcccataaaaactagacagaagcattctcagaaacttgttcgtgatgtgtgccctctactgacagagttgaacctttctttgcaaagagcagctttgaaacactctttttgtagaatctgcaagaggatatttggatagctttgaggatttcgttggaaacgggtatgtcttcagataaactctagacagaagcattctcagaaacttctttgggatgttgcattcaagtcacagagtagaacatacccattcatagagcagatttgaaacaatctttttgtagtatctggcagtggacatttggagcgctttcaggcctatgttgaaaaaggaaatatcttcccataaaaactagacggaagcattctcagaaacttacttgtgatgtgtttgctcaactaacagaattgaaccatcgttttgaaggagcagttttgaaacactgttttcgtggaatctgcaagtggatatttggctagctttgaggatttcgttggaaacgggattacatataaaaaggagacagcagcattctcagaaacttctttgtgatgtctgcattcaagtcacagagttgagcattccctttcatagagcaggttggaaacactctttttgtagtatctggatgaggacatttggagcgctttcaggcgtatggtgaaaaaggaaatatcttcccgtaaaaactagacagaaccattctcagaaatttatttgtgatgtgtgccctcaactaacagagttgaacctttcttttgatagagcagttttgaaacactctttttgtaaaatctgcaagaggatatttggatagctttgaggatttcgttgcaaacgggaatggcttcatataaactctagacagaagcattctcagaaacttcgttgggatgtttcgattgaagtcccagtgttgaacattcccttttatagagcaggttggaaacactctttctgcattccctggaagtggacatttggagcgctttcaggacgacggtgaaaatggaaatatcttccaagaaaatctagatagaagcaatgtcagaaacttttctgtgatggatctactcagctaacagagttgaacctttcttttgagagagcagttttgcaacactctttttgtggaatatgcaagtggatattagggcagctttgaggatttcgttggaaacgggaatacatgtaaaaagcagacagcagcattctcagaaacttctttgtgatgtttgtattgaagtcacagagttgaacattccctttgagagagcaggtttgaaacacgccttttgtcatatctggaagtgtccattcggagcgcattcaggcttgtgttgaaaaaggaaatatcctcccagaaaaactagacagaagcattctcagaaacttatctgtgatgtatgtactcaactaacagaactaaaccatcgttttgaaggagcagttttgaaacactctttttgcggaatctgcaagtggatatttggctagctgggaggatttcgttggaaacgggattacatacaaaaagcagacagcagcattctcagaaacttctttgtgatgtttgcattcaagtcacagagttgaacattccctttcatagagcaggtttgaaacactctttttgtagtatctggatgtggacatttggatcgctttcaggcctatggtgaaaaaggaaatatcttcccatgaaaactagacagaagcattctcagaaacttatttgtgatgtgtgccctcaactgacagtgttgaacctttgttttgatagagcagttctgaaacacactttttgtaaaatctgcaagaggatatttggatagctttgaggatttcgttggaaacgggaatgtcttcatgtaaactctacacagaagcattctcagaaactgctttgggatgtttcaattgaagtcccagtgttgaacattcccattcatagagcaggtttgaaacactctttttgtactatctggaagtggacatttggagcgctttcaggtctacggtgaaaaaggagatatcttccaataaaaactagatagaagcaatgtcagaacttttttcatgatgtatctactcagctaacagagttgaacctttcttttgagagagcagttttgaaacactctttttgtggaatatgcaagtgggtattaggccagcttggaggatttcgttggaaacgggaatacgtataaaaagcagacagcagcattgtcagaaactactttgtgatgtttgcattcaagtcacagaattgaacactccctttcacagagcaggtttgaaacactctttttgtagtgtctataagtgaacatttggcgtgctttcaggcctaaggtgaaaaaggaaatatcttcccataaaaactagacagaagcattctcagaaacttgttcgtgatgtgtgccctctactgacagagttgaacctttctttgcaaagagcagctttgaaacactctttttgtagaatctgcaagaggatatttggatagctttgaggatttcgttggaaacgggtatgtcttcagataaactctagacagaagcattctcagaaacttctttgggatgttgcattcaagtcacagagtagaacattcccattcatagagcagatttgaaacactctttttgtagtatctggaagtggacatttggagcgctttcaggcctatgttgaaaaaggaaatatcttcccataaaaactagacggaagcattctcagaaacttacttgtgatgtgtttgctcaactaacagaattgaaccatcgttttgaaggagcagttttgaaacactgttttcgtggaatctgcaagtggatatttggctagctttgaggatttcgttggaaacgggattacatataaaaaggagacagcagcattctcagaaacttctttgtgatgtctgcattcaagtcacagagttgagcattccctttcatagagcaggttggaaacactctttttgtagtatctggatgaggacatttggagcgctttcaggcctatggtgaaaaaggaaatatcttcccgtaaaaactagacagaagcattctcagaaatttatttgtgatgtgtgccctcaactaacagagttgaacctttcttttgatagagcagttttgaaacactctttttgtaaaatctgcaagaggatatttggatagctttgaggatttcgttgcaaacgggaatggcttcatataaactctagacagaagcattctcagaaacttcgttgggatgtttcgattgaagtcccagtgttgaacattcccttttatagagcaggttggaaacactctttctgcattccctggaagtggacatttggagcgctttcaggacgacggtgaaaatggaaatatcttccaagaaaatctagatagaagcaacgtcagaaacttttctgtgatggatctactcagctaacagagttgaacctttcttttgagagagcagttttgcaacactctttttgtggaatatgcaagtggatattagggcagctttgaggatttcgttggaaacgggaatacatgtaaaaagcagacagcagcattctcagaaacttctttgtgatgtttgcattgaagtcacagagttgaacattccctttgagagagcaggtttgaaacacaccttttgtcatatctggaagtgtccattcggagcgcattcaggcttgtgttgaaaaaggaaatatcctcccataaaaactagacagaagcattctcagaaacttatttgtgatgtatgtactcaagtaacagaactaaaccatcgttttgaaggagcagttttgaaacactctttttgcggaatctgcaagtggatatttggctagctgggaggatttcgttggaaacgggattacatacaaaaagcagacagcagcattctcagaaacttatttgtgatgtgtgccctcaactgacagtgttgaacctttgttttgatagagcagttctgaaacacactttttgtaaaatctgcaagaggatatttggatagctttgaggatttcgttggaaacgggaatgtcttcatgtaaactctagacagaagcattctcagaaactgctttgggatgtttcaattgaagtcccagtgttgaacattccctttcatagagcaggtttgaaacactctttttgtagtatctggatgaggacatttggagcgctttcaggcgtatggtgaaaaaggaaatatcttcccgtaaaaacaagacagaagcattctcagaagtatatttctgatgtgtgccctcaactaacagagttgaacctttcttttgatagagcagttttgaaacactctttttgtaaaatctgcaagaggatatttggatagctttgaggatttcgttgcaaacgggaatggcttcatataaactctagacagaagcattctcagaaacttcgttgggatgtttcgattgaagtcccagtgttgaacattcccattcatagagcaggtttgaaacactctttttgtactatctggaagtggacatttggagcgctttcaggtctacggtgaaaaaggagatatcttccaataaaaactagatagaagcaatgtcagaacttttttcatgatgtatctactcagcaaacagagttgaacctttcttttgagagagcagttttgaaacactctttttgtggaatatgcaagtgggtattaggccagcttggaggatttcgttggaaacgggaatacgtataaaaagcagacagcagcattgtcagaaactactttgtgatgtttgcattcaagtcacagaattgaacactccctttcacagagcaggtttgaaacactctttttgtagtgtctgtaagtgaacatttggattgctttcaggcctaaggtgaaaaaggaaatatcttcccataaaaactagacagaagcattctcagaaacttgtttgtgatgtgtgccctctactgacagagttgaacctttctttgcaaagagcagttttgaaacactctttttgtagaatctgcaagaggatatttggatagctttgaggatttcttgggaaacgggaatgtcttcagataaactctagacagaagcattctcagaaacttctttgggatgtttcaattgaagtcacagtgttgaacattccctttcacagagcaggtttgaaacactctttttgtagtgtctataagtgaacatttggcgtgctttcaggcctaacgtgaaaaaggaaatatcttcccataaaaactagacagaagcattctcagaaacttgttcgtgatgtgtgccctctactgacagagttgaacctttctttgcaaagagcagctttgaaacactctttttgtagaatctgcaagaggatatttggatagcttggaggatttcgttggaaacgggtatgtcttcagataaactctagacagaagcattctcagaaacttctttgggatgttgcattcaagtcacagagtagaacattcccattcatagagcagatttgaaacactctttttgtagtatctggaagtggacatttggagcgctttcaggcctatgttgaaaaaggaaatatcttcccataaaaactagacggaagcattctcagaaacttatttgtgatgtgtttgctcaactaacaggattgaaccatcgttttgaaggagcagttttgaaacactgttttcgtggaatctgcaagtggatatttggctagctttgaggatttcgttggaaacgggattacatataaaaaggagacagcagcattctcagaaacttctttgtgatgtctgcattcaattcacagagttgagcattccctttcatagagcaggttggaaacactctttttgtagtatctggatgaggacatttggagcgctttcaggcgtatggtgaaaaaggaaatatcttcccgtaaaaactagacagaagcattctcagaagtttatttgtgatgtgtgccctcaactaacagagttgaacctttcttttgatagagcagttttgaaacactctttttgtaaaatctgcaagaggatatttggatagctttgaggatttcgttgcgaacgggaatggcttcatataaactctagacagaagcattctcagaaacttcgttgggatgtttcgattgaagtcccagtgttgaacattcccttttatagagcaggttggaaacactctttctgcattccctggaagtggacatttggagcgctttcaggacgacggtgaaaatggaaatatcttccaagaaaatctagatagaagcaatgtcagaaacttttatgtgatggatctactcagctaacagagttgaacctttcttttgagagagcagttttgcaacactctttttgtggaatatgcaagtggatattagggcagctttgaggatttcgttggaaacgggaatacatgtaaaaagcagacagcagcattctcagaaacttctttgtgatgtttgcattgaagtcacagagttgaacattccctttgagagagcaggtttgaaacacgccttttgtcatatctggaagtgtccattcggagcgcattcaggcttgtgttgaaaaaggaaatatcctcccataaaaactaggacggaagcattctcagaaacttatctgtgatatatgtactcaactaacagaactaaaccatcgttttgaaggagcagttttgaaacactctttttgcggaatctgcaagtggatatttggctagctgggaggatttcgttggaaacgggattacatacaaaaagcagacagcagcattctcagaaacttctttgtgatgtttgcattcaagtcacagagttgaacattccctttcatagagcaggtttgaaacactctttttgtagtatctggatgtggacatttggatcgctttcaggcctatggtgaaaaaggaaatatcttcccatgaaaactagacagaagcattctcagaaacttattggtgatgtgtgccctcaactgacagtgttgaacctttgttttgatagagcagttctgaaaaacactttttgtaaaatctgcaagaggatatttggatagctttgaggatttcgttggaaacgggaatgtcttcatgtaaactctacacagaagcattctcagaaactgctttgggatgtttcaattgaagtcccagtgttgaacattccctttcatagagcaggtttgaaacactctttttgtactatctggaagtggacatttggagcgctttcaggtctacggtgaaaaaggagatatcttccaataaaaactagatagaagcaatgtcagaacttttttcatgatgtatctactcagcaaacagagttgaacctttcttttgagagagcagttttgaaacactctttttgtggaatatgcaagtgggtattaggccagcttggaggatttcgttggaaacgggaatacgtataaaaagcagacagcagcattgtcagaaactactttgtgatgtttgcattcaagtcacagaattgaacactccctttcacagagcaggtttgaaacactctttttgtagtgtctgtaagtgaacatatggattgctttcaggcctaaggtgaaaaaggaaatatcttcccataaaaactagacagaagcattctcagaaacttgtttgtgatgtgtgccctctactgacagagttgaacctttctttgcaaagagcagttttgaaacactctttttgtagaatctgcaagaggatatttggatagctttgaggatttcttgggaaacgggaatgtcttcagataaactctagacagaagcattctcagaaacttctttgggatgtttcaattgaagtcacagtgttgaacattccctttcacagagcaggtttgaaacactctttttgtagtgtctataagtgaacatttggcgtgctttcaggcgtaacgtgaaaaaggaaatatcttcccataaaaaccagacagaagcattctcagaaacttgttcttgatgtgtcccctctactgacagagttgaacctttctttgcaaagagcagctttgaaacactctttttgtagaatctgcaagaggatatttggatagcttggaggatttcgttggaaacgggtatgtcttcagataaactctagacagaagcattctcagaaacttctttgggatgttgcattcaagtcacagagtagaacattcccattcatagagcagatttgaaacactctttttgtagtatctggaagtggacatttggagcgctttcaggcctatgttgaaaaaggaaatatcttcccataaaaactagacggaagcattctcagaaacttatttgtgatgtgtttgctcaagtaacaggattgaaccatcgttttgaaggagcagttttgaaacactgttttcgtggaatctgcaagtggatatttggctagctttgaggatttcgttggaaacgggattacatataaaaaggagacagcagcattctcagaaacttctttgtgatgtctgcattcaagtcacagagttgagcaatccctttcatggagcaggtttgaaacactctttttgtagtatctggatgaggacatttggagcgcgttcaggcgtatggtgataaaggaaatatcttcccgtaaaaactagacagaagcattctcagaaatttatttgtgatgtgtgccctcaactaacagagttgaacctttcttttgatagagcagttttgaaacactctttttgtaaaatctgcaagaggatatttggagagctttgaggatttcgttgcaaacgggaatggcttcatataaactctagacagaagcattctcagaaacttcgttgggatgtttcgattgaagtcccagtgttgaacattcccttttatagagcaggttggaaacactctttctgcattccctggaagtggacatttggagcgctttcaggacgacggtgaaaatggaaatatcttccaagaaaatctagatagaagcaatgtcagaaacttttatgtgatggatctactcagctaacagagttgaacctttcttttgagagagcagttttgcaacactctttttgtggaatatgcaagtggatattagggcagctttgaggatttcgttggaaacgggaatacatgtaaaaagcagacagcagcattctcagaaacttctttgtgatgtttgcattgaagtcacagagttgaacattccctttgagagagcaggtttgaaacacgccttttgtcatatctggaagtgtccattcggagcgcattcaggcttgtgttgaaaaaggaaatatcctcccataaaaactagacagaagcattctcagaaacttatctgtgatgtatgtactcaactaacagaactaaaccatcgttttgaaggagcagttttgaaacactctttttgcggaatctgcaagtggatatttggctagctgggaggatttcgttggaaacgggattacatacaaaaagcagacagcagcattctcagaaacttctttgtgatgtttgcattcaagtcacagagttgaacattccctttcatagagcaggtttgaaacactctttttgtagtatctggatgtggacatttggatcgctttcaggcctatggtgaaaaaggaaatatcttcccatgaaaactagacagaagcattctcagaaacttatttgtgatgtgtgccctcaactgacagtgttgaacctttgttttgatagagcagttctgaaacacactttttgtaaaatctgcaagaggatatttggatagctttgaggatttcgttggaaacgggaatgtcttcatgtaaactctacacagaagcattctcagaaactgctttgggatgtttcaattgaagtcccagtgttgaacattccctttcatagagcaggtttgaaacactctttttgtactatctggaagtggacatttggagcgctttcaggtctacggtgaaaaaggagatatcttccaataaaaactagatagaagcaatgtcagaacttttttcatgatgtatctactcagcaaacagagttgaacctttcttttgagagagcagttttgaaacactctttttgtggaatatgcaagtgggtattaggccagcttggaggatttcgttggaaacgggaatacgtataaaaagcagacagcagcattgtcagaaactactttgtgatgtttgcattcaagtcacagaattgaacactccctttcacagagcaggtttgaaacacgctttttgtagtgtctgtaagtgaacatttggattgctttcaggcctaaggtgaaaaaggaaatatcttcccataaaaactagacagaagcattctcagaaacttgtttgtgatgtgtgccctctactgacagagttgaacctttctttgcaaagagcagttttgaaacactctttttgtagaatctgcaagaggatatttggatagctttgaggatttcttgggaaacgggaatgtcttcagataaactctagacagaagcattctcagaaacttctttgggatgtttcaattgaagtcacagtgttgaacattccctttcacagagcaggtttgaaacactctttttgtagtgtctataagtgaacatttggcgtgctttcaggcctaacgtgaaaaaggaaatatcttcccataaaaactagacagaagcattctcagaaacttgttcatgatgtgtgccctctactgacagagttgaacctttctttgcaaagagcagctttgaaacactctttttgtagaatctgcaagaggatatttggatagctttgaggatttcgttggaaacgggtatgtcttcagataaactctagacagaaagaattctcagaaacttctttgggatgttgcattcaagtcacagagtagaacattcccattcatagagcagatttgaaacactctttttgtagtatctggaagtggacatttggagcgctttcaggcctatgttgaaaaaggatatatcttcccataaaaactagacggaagcattctcagaaacttacttgtgatgtgtttgctcaactaacagaattgaaccatcgttttgaaggagcagttttgaaacactgttttcgtggaatctgcaagtggatatttggctagctttgaggatttcgttggaaacgggattacatataaaaaggagacagcagcattctcagaaacttctttgtgatgtctgcattcaagtcacagagttgagcattccctttcatagagcaggttggaaacactctttgtgtagtatctggatgaggacatttggagcgctttcaggcctatggtgaaaaaggaaatatcttcccgtaaaaactagacagaagcattctcagaaatttatttgtgatgtgtgccctcaactaacagagttgaacctttcttttgatagagcagttttgaaacactctttttgtaaaatctgcaagaggatatttggatagctttgaggatttcgttgcaaacgggaatggcttcatataaactctagacagaaacattctcagaaacttcgttgggatgtttcgattgaagtcccagtgttgaacattcccttttatagagcaggttggaaacactctttctgcattccctggaagtggacatttggagcgctttcaggacgacggtgaaaatggaaatatcttccaagaaaatctagatagaagcaatgtcagaaacttttatgtgatggatctactcagctaacagagttgaacctttcttttgagagagcagttttgcaacactctttttgtggaatatgcaagtggatattagggcagctttgaggatttcgttggaaacgggaatacatgtaaaaagcagacagcagcattctcagaaacttctttgtgatgtttgcattgaagtcacagagttgaacattccctttgagagagcaggtttgaaacacgccttttgtcatatctggaagtgtccattcggagggcattcaggcttgtgttgaaaaaggaaatatcctcccataaaaactagacagaagcattctcagaaacttatctgtgatgtatgtactcaactaacagaactaaaccatcgttttgaaggagcagttttgaaacactctttttgcgcaatctgcaagtggatatttggctagctgggaggatttcgttggaaacgggattacatacaaaaagcagacagcagcattctcagaaacttctttgtgatttttgcattcaagtcacagagttgaacattccctttcatagagcaggttggaaacactctttttgtagtatctggatgtggacatttggatcgctttcaggcctatggtgaaaaaggaaatatcttcccatgaaaactagacagaagcattctcagaaacttatttgtgatgtgtgccctcaactgacagtgttgaacctttgttttgatagagcagttctgaaacacactttttgtaaaatctgcaagaggatatttggatagctttgaggatttcgttggaaacgggaatgtcttcatgtaaactctggacagaagcattctcagaaactgctttgggatgtttcaattgaagtcacagtgttgaacattcccattcatagagcaggtttgaaacactctttttgtactatctggaagtggacatttggagcgctttcaggtctacggtgaaaaaggagatatcttccaataaaaactagatagaagcaatgtcagaacttttttcatgatgtatctactcagcaaacagagttgaacctttcttttgagagagcagttttgaaacactctttttgtggaatatgcaagtgggtattaggccagcttggaggatttcgttggaaacgggaatacgtataaaaagcagacagcagcattgtcagaaactactttgtgatgtttgcattcaagtcacagaattgaacactccctttcacagagcaggtttgaaacacactttttgtagtgtctgtaagtgaacatttggattgctttcaggcctaaggtgaaaaaggaaatatcttcccataaaaactagacagaagcattctcagaaacttgtttgtgatgtgtgccctctactgacagagttgaacctttctttgcaaagagcagttttgaaacactctttttgtagaatctgcaagaggatatttggatagctttgaggatttcttgggaaacgggaatgtcttcagataaactctagacagaagcattctcagaaacttctttgggatgtttcaattgaagtcacagtgttgaacattccctttcacagagcaggtttgaaacactctttttgtagtgtctataagtgaacatttggcgtgctttcaggcctaacgtgaaaaaggaaatatcttcccataaaaactagacagaagcattctcagaaacttgttcgtgatgtgtgccctctactgacagagttgaacctttctttgcaaagagcagctttgaaacacactttttgtagaatctgcaagaggatatttggatagctttgaggatttcgttggaaacgggtatgtcttcagataaactactagacagaagcattctcagaaacttctttgggatgttgcattcaagtcacagagtagaacattcccattcatagagcagatttgaaacactctttttgtagtatctggaagtggacatttggagcgctttcaggcctatgttgaaaaaggaaatatcttcccataaaaactagacggaagcattctcagaaacttatttgtgatgtgtttgctcaactaacaggattgaaccatcgttttgaaggagcagttttgaaacactgttttcgtggaatctgcaagtggatatttggctagctttgaggatttcgttggaaacgggattacatataaaaaggagacagcagcattctcagaaacttctttgtgatgtctgcattcaattcacagagttgagcattccctttcatagagcaggttggaaacactctttttgtagtatctggatgaggacatttggagcgctttctggcctatggtgaaaaaggaaatatcttcccgtaaaaactagacagaagcattctcagaagtttgtttgtgatgtgtgccctcaactaacagagttgaacctttcttttgatagagcagttttgaaacactctttttgtaaaatctgcaagaggatatttggatagctttgaggatttcgttgcaaacgggaatggcttcatataaactctagacagaagcattctcagaaacttcgttgggatgtttcgattgaagtcccagtgttgaacattcccttttatagagcaggttggaaacactctttctgcattccctggaagtggacatttggagcgctttcaggacgacggtgaaaatggaaatatcttccaagaaaatctagatagaagcaatgtcagaaaattttctgtgatggatctactcagctaacagagttgaagctttcttttgagagagcagttttgcaacactctttttgtggaatatgcaagtggatattagggcagctttgaggatttcgttggaaacgggaatacatgtaaaaagcagacagcagcattctcagaaacttctttgtgatgtttgcattgaagtcacagagttgaacattccctttgagagagcaggtttgaaacacgccttttgtcatatctggaagtgtccattcggagcgcattcaggcttgtgttgaaaaaggaaatatcctcccataaaaactagacagaagcattctcagaaacttatctgtgatgtatgtactcaactaacagaactaaaccatcgttttgaaggagcagttttgaaacactctttttgcggaatatgcaagtggatatttggctagcttggaggatttcgttggaaacgggattacatacaaaaagcagagagcagcattctcagaaacttctttgtgatgtttgcattcaagtcacagagttgaacattccctttcatagagcaggtttgaaacactctttttgtagtatgtggatgtggacatttggatcgctttcaggcctatggtgaaaaaggaaatatcttcccatgaaaactagacagaagcattctcagaaatttatttgtgatgtgtgccctcaactaacagagttgaacctttcttttgatagagcagttttgaaacactctttttgtaaaatctgcaagaggatatttggatagctttgaggatttcgttgcaaacgggaatggcttcatataaactctagacagaagcattctcagaaacttcgttgggatgtttcgattgaagtcccagtgttgaacattcccttttatagagcaggttggaaacactctttctgcattccctggaagtggacatttggagcgctttcaggacgacggtgaaaatggaaatatcttccaagaaaatctagatagaagcaatgtcagaaacttttatgtgatggatctactcagctaacagagttgaagctttcttttgagagagcagttttgccacactctttttgtggaatatgcaagtggatattagggcagctttgaggatttcgttggaaacgggaatacatgtaaaaagcagacagcagcattctcagaaacttctttgtgatgtttgcattgaagtcacagagttgaacattccctttgagagagcaggtttgaaacacgccttttgtcatatctggaagtgtccattcggagcgcattcaggcttgtgttgaaaaaggaaatatcctcccataaaaactagacagaagcattctcagaaacttatctgtgatgtatgtactcaactaacagaactaaaccatcgttttgaaggagcagttttaaaacactctttttgcggaatctgcaagtggatatttggctagctgggaggatttcgttggaaacgggattacatacaaaaagcagacagcagcattctcagaaacttctttgtgatgtttgcattcaagtcacagagttgaacattccctttcatagagcaggtttgaaacactctttttgtagtatctggatgtggacatttggatcgctttcaggcctatggtgaaaaaggaaatatcttcccatgaaaactagacagaagcattctcagaaacttatttgtgatgtgtgccctcaactgacagtgttgaacctttgttttgatagagcagttctgaaacacaccttttgtaaaatctgcaagaggatatttggatagctttgaggatttcgttggaaacgggaatgtcttcatgtaaactctagacagaagcattctcagaaactgctttgggatgtttcaattgaagtcccagtgttgaacattccctttcatagagcaggtttgaaacactctttttgtactatctggaagtggacatttggagcgctttcaggtctacggtgaaaaaggagatatcttccaataaaaactagatagaagcaatgtcagaacttttttcatgatgtatctactcagcaaacagagttgaacctttcttttgagagagcagttttgaaacactctttttgtggaatatgcaagtgggtattaggccagcttggaggatttcgttggaaacgggaatacgtataaaaagcagacagcagcattgtcagaaactactttgtgatgtttgcattcaagtcacagaattgaacactccctttcacagagcaggtttgaaacactctttttgtagtgtctgtaagtgaacatttggattgctttcaggcctaaggtgaaaaaggaaatatcttcccataaaaactagacagaagcattctcagaaacttgtttgtgatgtgtgccctctactgacagagttgaacctttctttgcaaagagcagttttgaaacactctttttgtagaatctgcaagaggatatttggatagctttgaggatttcttgggaaacgggaatgtcttcagataaactctagacagaagcattctcagaaacttctttgggatgtttcaattgaagtcacagtgttgaacattccctttcacagagcaggtttgaaacactctttttgtagtgtctataagtgaacatttggcgtgctttcaggcctaacgtgaaaaaggaaatctcttcccataaaaactagacagaagcattctcagaaacttgttcatgatgtgtgccctctactgacagagttgaacctttctttgcaaagagcagctttgaaacactctttttgtagaatctgcaagaggatatttggatagctttgaggatttcgttggaaacgggtatgtcttcagataaactctagacagaagcattctcagaaacttctttgggatgttgcattcaagtcacagagtagaacattcccattcatagagcagatttgaaacactctttttgtagtatctggaagtggacatttggagcggtttaaggcctatgttgaaaaaggaaatatcttcccataaaaactagacggaagcattctcagaaacttacttgtgatgtgtttgctcaactaacagaattgaaccatcgttttgaaggagcagttttgaaacactgttttcgtggaatctgcaagtggatatttggctagctttgaggatttcgttggaaacgggattacatataaaaaggagacagcagcattctcagaaacttctttgtgatgtctgcattcaagtcacagagttgagcattccctttcatagagcaggttggaaactctctttttgtagtatctggatgaggacatttggagcgctttcaggcgtatggtgaaaaaggaaatatcttcccgtaaaaactagacagaagcattctcagaaatttatttgtgatgtgtgccctcaactaacagagttgaacctttcttttgatagagcagttttgaaacactctttttgtaaaatctgcaagaggatatttggatagctttgaggatttcgttgcaaacgggaatggcttcatataaactctagacagaagcattctcagaaacttcgttgggatgtttcgattgaagtcccagtgttgaacattcccttttatagagcaggttggaaacactctttctgcattccctggaagtggacatttggagcgctttcaggacgacggtgaaaatggaaatatcttccaataaaatctagatagaagcaacgtcagaaacttttatgtgatggatctactcagctaacagagttgaacctttcttttgagagagcagttttgcaacactctttttgtggaatatgcaagtggatattagggcagctttgaggatttcgttggaaacgggaatacatgtaaaaagcagacagcagcattctcagaaacttctttgtgatgtttgcattgaagtcacagagttgaacattccctttgagagagcaggtttgaaacacgccttttgtcatatctggaagtgtccattcggagcgcattcaggcttgtgttgaaaaaggaaatatcctcccataaaaactagacagaagcattctcagaaacttatctgtgatgtatgtactcaactaacagaactaaaccatcgttttgaaggagcagttttgaaacactctttttgcggaatctgcaagtggatatttggctagctgggaggatttcgttggaaacgggattacatacaaaaagcagacagcagcattctcagaaacttctttgtgatgtttgcattcaagtcacagagttgaacattccctttcatagagcaggtttgaaacactctttttgtagtatctggatgtggacatttggatcgctttcaggcctatggtgaaaaaggaaatatcttcccatgaaaactagacagaagcattctcagaaacttatttgtgatgtgtgccctcaactgacagtgttgaacctttgttttgatagagcagttctgaaacacactttttgtaaaatctgcaagaggatatttggatagctttgaggatttcgttggaaacgggaatgtcttcatgtaaactctagacagaagcattctcagaaactgctttgggatgtttcaattgaagtcccagtgttgaacattccctttcatagagcaggtttgaaacactctttttgtactatctggaagtggacatttagagcgctttcaggtctacggtgaaaaaggagatatcttccaataaaaactagatagaagcaatgtcagaacttttttcatgatgtatctactcagcaaacagagttgaacctttcttttgagagagcagtttcgaaacactctttctgtggaatatgcaagtgggtattaggccagcttggaggatttcgttggaaacgggaatacgtataaaaagcagacagcagcattgtcagaaactactttgtgatgtttgcattcaagtcacagaattgaacactccctttcacagagcaggtttgaaacactctttttgtagtgtctgtaagtgaacatttggattgctttcaggcctaaggtgaaaaaggaaatatcttcccataaaaactagacagaagcattctcagaaacttgtttgtgatgtgtgccctctactgacagagttgaacctttctttgcaaagagcagttttgaaacactctttttgtagaatctgcaagaggatatttggatagctttgaggatttcttgggaaacgggaatgtcttcagataaactctagacagaagcattctcagaaacttctttgggatgtttcaattgaagtcacagtgttgaacattccctttcacagagcaggtttgaaacactctttttgtagtgtctataagtgaacatttggcgtgctttcaggcgtaacgtgaaaaaggaaatatcttcccataaaaactagacagaagcattctcagaaacttgttcgtgatgtgtgccctctactgacagagttgaacctttctttgcaaagagcagctttgaaacacactttttgtagaatctgcaagaggatatttggaaagctttgaggatttcgttggaaacgggtatgtcttcagataaactctagacagaagcattctcagaaacttctttgggatgttgcattcaagtcacagagtagaacattcccattcatagagcagatttgaaacactctttttgtagtatctggaagtggacatttggagcgctttcaggcctatgttgaaaaaggaaatatcttcccataaaaactagacggaagcattttcagaaacttacttctgatgtgtttgctcaactaacagaattgaaccatcgttttgaaggagcagttttgaaacactgttttcgtggaatctgcaagtggatatttggctagctttgaggatttcgttggaaacgggattacctataaaaaggagacagcagcattctcagaaacttctttgtgatgtctgcattcaagtcacagagttgagcattccctttcatagagcaggtttgaaacactctttttgtagtatctggatgaggacatttggagcgctttcaggcgtatggtgaaaaaggaaatatcttcccgtaaaaactagacagaagcattctcagaaatttatttgtgatgtgtgccctcaactaacagagttgaacctttcttttgatagagcagttttgaaacactctttttgtaaaatctgcaagaggatatttggatagctttgaggatttcgttgcaaacgggaatggcttcatataaactctagacagaagcattctcagaaacttcgttgggatgtttcgattgaagtcccagtgttgaacattcccttttatagagcaggttggaaacactctttttgcattccctggaagtggacatttggagcgctttcaggacgacggtgaaaatggaaatatcttccaagaaaatctagatagaagcaatgtcagaaacttttatgtgatggatctactcagctaacagagttgaagctttcttttgagagagcagttttgcaacactctttttgtggaatatgcaagtggatattagggcagctttgaggatttcgttggaaacgggaatacatgtaaaaagcagacagcagcattctcagaaacttctttgtgatgtttgcattgaagtcacagagttgaacattccctttgagagagcaggtttgaaacacgccttttgtcatatctggaagtgtccattcggagcgcattcaggcttgtgttgaaaaaggaaatatcctcccataaaaactagacagaagcattctcagaaacttatttgtgatgtatgtactcaactaacagaactaaaccatcgttttgaaggagcagttttgaaacactctttttgcggaatctgcaactggatatttggctagcttggaggatttcgttggaaacgggattacataaaaaagcagacagcagcattctcagaaacttctttgtgatgtttgcattcaagtcgcagagttgaacattccctttcatagagcaggtttgaaacactctttttgtagtatctggatgtggacatttggatcgctttcaggcctatggtgaaaaaggaaatatcttcccatgaaaactagacagaagcattctcagaaacttatttgtgatgtgtgccctcaactgacagtgttgaacctttgttttgatagagcagttctgaaacacactttttgtaaaatctgcaagaggatatttggatagctttgaggatttcgttggaaacgggaatgtcttcatgtaaactctagacagaagcattctcagaaactgctttgggatgtttcaattgaagtcccagtgttgaacattccctttcatagagcaggtttgaaacactctttttgtagtatctggaagtggacatttggagcgctttcaggtctacggtgaaaaaggagatatcttccaataaaaactagatagaagcaatgtcagaacttttttcatgatgtatctactcagcaaacagagttgaacctttcttttgagagagcacttttgaaacactctttttgtggaatatgcaagtgggtattaggccagcttggaggatttcgttggaaacgggaatacgtataaaaagcagacagcagcattgtcagtaaactactttgtgatgtttgcattcaagtcacagaattgaacactccctttcacagagcaggtttgaaacactctttttgtagtgtctgtaagtgaacatttggattgctttcaggcctatggtgaaaaaggaaatatcttcccataaaaactagacagaagcattctcagaaactagtttgtgatgtgtgccctctactgacagagttgaacctttctttgcaaagagcagttttgaaacactctttttgtagaatctgcaagaggatatttggatagctttgaggatttcttgggaaacgggaatgtcttcagataaactctagacagaagcattctcagaaacttctttgggatgtttcaattgaagtcacagtgttgaacattccctttcacagagcaggtttgaaacactctttttgtagtgtctataagtgaacatttggcgtgctttcaggcgtaacgtgaaaaaggaaatatcttcccataaaaaccagacagaagcattctcagaaacttgttcgtgatgtgtgccctctactgacagagttgaacctttctttgcaaagagcagctttgaaacacactttttgtagaatctgcaagaggatatttggatagctttgaggatttcgttggaaacgggtatgtcttcagatatactctagacagaagcattctcagaaacttctttgggatgttgcattcaagtcacagagtagaacattcccattcatagagcagatttgaaacactctttttgtagtatctggaagtggacatttggagcgctttcaggcctatgttgaaaaaggaaatatcttcccataaaaactagacggaagcattctcagaaacttatttgtgatgtgtttgctcaactaacaggattgaaccatcgttttgaaggagcagttttgaaacactgttttcgtggaatctgcaagtggatatttggctagctttgaggatttcgttggaaacgggattacatataaaaaggagacagcagcattctcagaaacttctttgtgatgtctgcattcaattcacagagttgagcattccctttcatagagcaggttggaaacactctttttgtagtatctggatgaggacatttggagcgcttcaggcgtatggtgaaaaaggaaatatcttcccgtaaaaactagacagaagcattctcagaaatttatttgtgatgtgtgccctcaactaacagagttgaacctttcttttgatagagcagttttgaaacactctttttgtaaaatctgcaagaggatatttggatagctttgaggatttcgttgcaaacgggaatggcttcatataaactctagacagaagcattctcagaaacttcgttgggatgtttcgattgaagtcccagtgttgaacattcccttttatagagcaggttggaaacactctttctgcattccctggaagtggacatttggagcgctttcaggacgacggtgaaaatggaaatatcttccaagaaaatctagatagaagcaacgtcagaaacttttatgtgatggatctactcagctaacagagttgaacctttcttttgagagagcagttttgcaacactctttttgtggaatatgcaagtggatattagggcagctttgaggatttcgttggaaacgggaatacatgtaaaaagcagacagcaagcattctcagaaacttctttgtgatgtttgcattgaagtcacagagttgaacattccctttgagagagcaggtttgaaacacgccttttgtcatatctggaagtgtccattcggagcgcattcaggcttgtgttgaaaaaggaaatatcctcccataaaaactagacagaagcattctcagaaacttatctgtgatgtatgtactcaactaacagaactaaaccatcgttttgaaggagcagttttgaaacactctttttgtggaatctgcaagtggatatttggctagctgggaggatttcgttggaaacgggattacatacaaaaagcagagagcagcattctcagaaacttctttgtgatgtttgcattcaagtcacagagttgaacattccctttcatagagcaggtttgaaacactctttttgtagtatctggatgtggacatttggatcgctttcaggcctatggtgaaaaaggaaatatcttcccatgaaaactagacagaagcattctcagaaacttatttgtgatgtgtgccctcaactgacagtgttgaacctttgttttgatagagcagttctgaaacacactttttgtaaaatctgcaagaggatatttggatagctttgaggatttcgttggaaacgggaatgtcttcatgtaaactctagacagaagcattctcagaaactgctttgggatgtttcaattgaagtcccagtgttgaacattccctttcatagagcaggtttgaaacactctttttgtagtatctggaagtggacatttggagcgctttcaggtctacggtgaaaaaggagatatcttccaataaaaactagatagaagcaatgtcagaacttttttcatgatgtatctactcagcaaacagagttgaacctttcttttgagagagcagttttgaaacactctttttgtggaatatgcaagtgggtattaggccagcttggaggatttcgttggaaacgggaatacgtataaaaagcagacagcagcattgtcagaaactactttgtgatgtttacattcaagtcacagaattgaacactccctttcacagagcaggtttgaaacactctttttgtagtgtctgtaagtgaacatttggattgctttcaggcctaaggtgaaaaaggaaatgtcttcccataaaaactagacagaagcattctcagaaacttgtttgtgatgtgtgccctctactgacagagttgaacctttctttgcaaagagcagttttgaaacactctttttgtagaatctgcaagaggatatttggatagctttgaggatttcttgggaaacgggaatgtcttcagataaactctagacagaagcattctcagaaacttctttgggatgtttcaattgaagtcacagtgttgaacattccctttcacagagcaggtttgaaacactctttttgtagtgtctataagtgaacatttggcgtgctttcaggcgtaacgtgaaaaaggaaatatcttcccataaaaactagacagaagcattctcagaaacttgttcttgatgtgtcccctctactgagagagttgaacctttctttgcaaagagcagctttgaaacactctttttgtagaatctgcaagaggatatttggatagcttggaggatttcgttggaaacgggtatgtcttcagataaactctagacagaagcattctcagaaacttctttgggatgttgcattcaagtcacagagtagaacattcccattcatacagcagatttgaaacactctttttgtagtatctggaagtggacatttggagcgctttcaggcctatgttgaaaaagcaaatatcttcccataaaaactagacggaagcattctcagaaacttaattgtgatgtgtttgctcaactaacaggattgaaccatcgttttgaaggagcagttttgaaacactgttttcgtggaatctgcaagtggatatttggctagctttgaggatttcgttggaaacgggattacatatacaaaggagacagcagcattctcagaaacttctttgtgatgtctgcattcaattcacagagttgagcattccctttcctagagcacgttggaaacactctttttgtagtatctggatgaggacatttggagcgctttcaggcgtatggtgaaaaaggaaatatcttcccgtaaaaactagacagaagcattctcagaagtttatttgtgatgtgtgccctcaactaacagagttgaacctttcttttgatagagcagttttgaaacactctttttgtaaaatctgcaagaggatatttggatagctttgaggatttcgttgcaaacgggaatggcttcatataaactctagacagaagcattctcagaaacttcgttgggatgtttcgattgaagtcccagtgttgaacattcccttttatagagcaggttggaaacactctttctgcattccctggaagtggacatttggagcgctttcaggacgacggtgaaaatggaaatatcttccaagaaaatctagatagaagcaatgtcagaaacttttatgtgatggatctactcagctaacagagttgaacctttcttttgagagagcagttttgcaacactctttttgtggaatatgcaagtggatattagggcagctttgaggatttcgttggaaacgggaatacatgtaaaaagcagacagcagcattctcagaaacttctttgtgatgtttgcattgaagtcacagagtagaacattccctttgagagagcaggtttgaaacacgccttttgtcatatctggaagtgtccattcggagcgcattcaggcttgtgttgaaaaaggaaatatcctcccagaaaaactagacagaagcaatctcagaaacttatttgtgatgtatgtactcaactaacagaactaaaccatcgttttgaaggagcagttttgaaacactctttttgcggaatctgcaagtggatatttggctagcttggaggatttcgttggaaacgggattacatacaaaaagcagagagcagcattctcagaaacttctttgtgatgtttgcattcaagtcacagagttgaacattccctttcatagagcaggtttgaaacactctttttgtagtatctggatgtggacatttggatcgctttcaggcctatggtgaaaaaggaaatatcttcccatgaaaactagacagaagcattctcagaaacttatttgtgatgtgtgccctcaactgacagtgttgaacctttgttttgatagagcagttctgaaacacactttttgtaaaatctgcaagaggatatttggatagctttgaggatttcgttggaaacgggaatgtcttcatgtaaactctggacagaagcattctcagaaactgctttgggatgtttcaattgaagtcccagtgttgaacattccctttcatagagcaggtttgaaacactctttttgtactatctggaagtggacatttggagcgctttcaggtctacggtgaaaaaggagatatcttccaataaaaactagatagaagcaatgtcagaacttttttcatgatgtatctactcagcaaacagagttgaacctttcttttgagagagcagttttgaaacactctttttgtggaatatgcaagtgggtattaggccagcttggaggatttcgttggaaacgggaatacgtataaaaagcagacagcagcattgtcagaaactactttgtgatgtttgcattcaagtcacagaattgaacactccctttcacagagcaggtttgaaacacactttttgtagtgtctgtaagtgaacatttggattgctttcaggcctaaggtgaaaaaggaaatatcttcccataaaaactagacagaagcattctcagaaacttgtttgtgatgtgtgccctctactgacagagttgaacctttctttgcaaagagcagctttgaaacactctttttgtagaatctgcaagaggatatttggatagctttgaggatttcttgggaaacgggaatgtcttcagataaactctagacagaagcattctcagaaacttctttgggatgtttcaattgaagtcacagtgttgaacattccctttcacagagcaggtttgaaacactctttttgtagtgtctataagtgaacatttggcgtgctttcaggcctaacgtgaaaaaggaaatatcttcccataaaaactagacagaagcattctcagaaacttgttcttgatgtgtcccctctactgacagagttgaacctttctttgcaaagagcagctttgaaacactctttttgtagaatctgcaagaggatatttggatagcttggaggatttcgttggaaacgggtatgtcttcagataaactctagacagaagcattctcagaaacttctttgggatgttgcattcaagtcacagagtagaacattcccattcatagagcagatttgaaacactctttttgtagtatctggaagtggacatttggagcgctttcaggcctatgttgaaaaaggaaatatcttcccataaaaactagacggaagcattctcagaaacttatttgtgatgtgtttgctcaactaacaggattgaaccatcgttttgaaggagcagttttgaaacactgttttcgtggaatctgcaagtggatatttggctagctttgaggatttcgttggaaatgggattacatatacaaaggagacagcagcattctcagaaacttctttgtgatgtctgcattcaattcacagagttgagcattccctttcatagagcaggttggaaacactctttttgtagtatctggatgaggacatttggagcgctttctggcctatggtgaaaaaggaaatatcttcctgtaaaaactagacagaagcattctcagaagtttatttgtgatgtgtgccctcaactaacagagttgaacctttcttttgatagagcagttttgaaacactctttttgtaaaatctgcaagaggatatttggatagctttgaggatttcgttgcaaacgggaatggcttcatataaactctagacagaagcattctcagaaacttcgttgggatgtttcgattgaagtcccagtgttgaacattcccttttatagagcaggttggaaacactctttctgcattccctggaagtggacatttggagcgctttcaggacgacggtgaaaatggaaatatcttccaagaaaatctagatagaagcaatgtcagaaacttttatgtgatggatctactcagctaacagagttgaacctttcttttgagagagcagttttgcaacactctttttgtggaatatgcaagtggatattagggcagctttgaggatttcgttggaaacgggaatacatgtaaaaagcagacagcagcattctcagaaacttctttgtgatgtttgcattgaagtcacagagttgaacattccctttgagagagcaggtttgaaacacgccttttgtcatatctggaagtgtccattcggagcgcattcaggcttgtgttgaaaaaggaaatatcctcccataaaaactagacagaagcattctcagaaacttatctgtgatgtatgtactcaactaacagaactaaaccatcgttttgaaggagcagttttgaaacactctttttgcggaatctgcaagtggatatttggctagctgggaggatttcgttggaaacgggattacatacaaaaagcagacagcagcattctcagaaacttctttgtgatgtctgcattcaagtcacagagttgagcattccctttcatagagcaggtttgaaacactctttttgtagtatctggatgtggacatttggatcgctttcaggcctatggtgaaaaaggaaatatcttcccatgaaaactagacagaagcattctcagaaacttatttgtgatgtgtgccctcaactgacagtgttgaacctttgttttgatagagcagttctgaaacacactttttgtaaaatctgcaagaggatatttggatagctttgaggatttcgttggaaacgggaatgtcttcatgtaaactctagacagaagcattctcagaaactgctttgggatgtttcaattgaagtcccagtgttgaacattccctttcatagagcaggtttgaaacactctttttgtactatctggaagtggacatttggagcgctttcaggtctacggtgaaaaaggagatatcttccaataaaaactagatagaagcaatgtcagaacttttttcatgatgtatctactcagcaaacagagttgaacctttcttttgagagagcagtttcgaaacactctttctgtggaatatggaagtgggtattaggccagcttggaggatttcgttggaaacgggaatacgtataaaaagcagacagcagcattgtcagaaactactttgtgatgtttgcattcaagtcacagaattgaacactccctttcacagagcaggtttgaaacactctttttgtagtgtctataagtgaacatttggcgtgctttcaggcgtaacgtgaaaaaggaaatatcttcccataaaaactagacagaagcattctcagaaacttgttgttgatgtgtcccctctactgacagagttgaacctttctttgcaaagagcagctttgaaacactctttttgtagaatctgcaagaggatatttggatagcttggaggatttcgttggaaacgggtatgtcttcagataaactctagacagaagcattctcagaaacttctttgggatgttgcatgcaagtcacagagtagaacattcccattcatagagcagatttgaaacactctttttgtagtatctgaaagtggacatttggagcgctttcaggcctatgttgaaaaaggaaatatcttcccataaaaactagacggaagcattctcagaaacttatttgtgatgtgtttgctcaactaacaggattgaaccatcgttttgaaggagcagttttgaaacactgttttcgtggaatctgcaagtggatatttggctagctttgaggatttcgttggaaacgggattacatataaaaaggagacagcagcattctcagaaacttctttgtgatgtctgcattcaattcacagagttgagcattccctttcatagagcaggttggaaacactctttttgtagtatctggatgtggacatttggatcgctttcaggcctatggtgaaaaaggaaatatcttcccatgaaaactagacagaagcattctcagaaacttatttgtgatgtgtgcactcaactgacactgttgaacctttgttttgatagagcagttctgaaacacactttttgtaaaatctgcaagaggatatttggatagctttgaggatttcgttggaaacgggaatgtcttcatgtaaactctagacagaagcattctcagaaactgctttgggatgtttcaattgaagtcccagtgttgaacattcccattcatagagcaggtttgaaacactctttttctactatctggaagtggacatttggagcgctttcaggtctacggtgaaaaaggagatatcttccaataaaaactagatagaagcaatgtcagaacttttttcatgatgtatctactcagcaaacagagttgaacctttcttttgagagagcagttttgaaacactctttttgtggaatatgcaagtgggtattaggccagcttggaggatttcgttggaaacgggaatacgtataaaaagcagacagccagcattgtcagaaactactttgtgatgtttgcattcaagtcacagaattgaacactccctttcacagagcaggtttgaaacactctttttgtagtgtctgtaagtgaacatttggattgctttcaggcctaaggtgaaaaaggaaatatcttcccataaaaactagacagagcattctcagaaacttgtttgtgatgtgtgccctctactgacagagttgaacctttctttgcaaagagcagttttgaaacactctttttgtagaatctgcaagaggatatttggatagctttgaggatttcttgggaaacgggaatgtcttcagataaactctagacagaagcattctcagaaacttctttgggatgtttcaattgaagtcacagtgttgaacattccctttcacagagcaggtttgaaacactctttttgtagtgtctataagtgaacatttggcgtgctttcaggcctaacgtgaaaaaggaaatatcttcccataaaaactagacagaagcattctcagaaacttgttcgtgatgtgtgccctctactgacagagttgaacctttctttgcaaagagcagctttgaaacactctgtttgtagaatctgcaagaggatatttggatagctttgaggatttcgttggaaacgggtatgtcttcagataaactctagacagaagcattctcagaaacttctttgggatgttgcattcaagtcacagagtagaacattcccattcatagagcagatttgaaacactctttttgtagtatctggaagtggacatttggagcgctttcaggcctatgttgaaaaaggaaatatcttcccataaaaactagacggaagcattctcagaaacttacttgtgatgtgtttgctcaactaacagaattgaaccatcgttttgaaggagcagttttgaaacactcttttcgtggaatctgcaagtggatatttggctagctttgaggatttcgttggaaacgggattacatataaaaaggagacagcagcattctcagaaacttctttgtgatgtctgcattcaagtcacagagttgagcattccctttcatagagcaggttggaaacactctttttgtagtatctggatgaggacatttggagcgctttcaggcgtatggtgaaaaaggaaatatcttcccgtaaaaactagacagaagattctcagaaatttatttgtgatgtgtgccctcaactaacagagttgaacctttcttttgatagagcagttttgaaacactctttttgtaaaatctgcaagaggatatttggatagctttgaggatttcgttgcaaacgggaatggcttcatataaactctagacagaagcattctcagaaacttcgttgggatgtttcgattgaagtcccagtgttgaacattcccttttatagagcaggttggaaacactctttctgcattccctggaagtggacatttggagcgctttcaggacgacggtgaaaatggaaatatcttccaagaaaatctagatagaagcaacgtcagaaacttttatgtgatggatctactcagctaacagagttgaacctttcttttgagagagcagttttgcaacactctttttgtggaatatgcaagtggatattagggcagctttgaggatttcgttggaaacgggaatacatgtaaaaagcagacagcagcattctcagaaacttctttgtgatgtttgcattgaagtcacagagttgaacattccctttgagagagcaggtttgaaacacgccttttgtcatatctggaagtgtccattcggagcgcattcaggcttgtgttgaaaaaggaaatatcctcccataaaaactagacagaagcattctcagaaacttatctgtgatgtatgtactcaactaacagaactaaaccatcgttttgaaggagcagttttgaaacactctttttgcggaatctgcaagtggatatttggctagcttggaggatttcgttggaaacgggattacatacaaaaagcagagagcagcattctcagaaacttatttgtgatgtgtgccctcaactgacagtgttgaacctttgttttgatagagcagttctgaaacacactttttgtaaaatctgcaagaggatatttggatagctttgaggatttcgttggaaacgggaatgtcttcatgtaaactctacacagaagcattctcagaaactgctttgggatgtttcaattgaagtcccagtgttgaacattcccattcatagagcaggtttgaaacactctttttgtactatctggaagtggacatttggagcgctttcaggtctacggtgaaaaaggagatatcttccaataaaaactagatagaagcaatgtcagaacttttttcatgatgtatctactcagcaaacagagttgaacctttcttttgagagagcagttttgaaacactctttttgtggaatatgcaagtgggtattaggccagcttggaggatttcgttggaaacgggaatacgtataaaaagcagacagcagcattgtcagaaactactttgtgatgtttgcattcaagtcacagaattgaacactccctttcacagagcaggtttgaaacactctttttgtagtgtctgtaagtgaacatttggattgctttcaggcctaaggtgaaaaaggaaatatcttcccataaaaactagacagaagcattctcagaaacttgtttgtgatgtgtgccctctactgacagagttgaacctttctttgcaaagagcagttttgaaacactctttttgtagaatctgcaagaggatatttggatagctttgaggatttcttgggaaacgggaatgtcttcagataaactctagacagaagcattctcagaaactcctttgggatgtttcaattgaagtcacagtgttgaacattccctttcacagagcaggtttgaaacactctttttgtagtgtctataagtgaacatttggcgtgctttcaggcctaacgtgaaaaaggaaatatcttcccataaaaactagacagaagcattctcagaaacttgttcgtgatgtgtgccctctactgacagagttgaacctttctttgcaaagagcagctttgaaacacactttttgtagaatctgcaagaggatatttggatagcttggaggatttcgttggaaacgggtatgtcttcagataaactctagacagaaacattctcagaaacttctttgggatgttgcattcaagtcacagagtagaacattcccatgcatagagcagatttgaaacactctttttgtagtatctggaagtggacatttggagcgctttcaggcctatgttgaaaaaggaaatatcttcccataaaaactagacgggaagcattctcagaaacttacttgtgatgtgtttgctcaactaacagaattgaaccatcgttttgaaggagcagttttgaaacactgttttcgtggaatctgcaagtggatatttggctagctttgaggatttcgttggaaacgggattacatataaaaaggagacagcagcattctcagaaacttctttgtgatgtctgcattcaattcacagagttgagcattccctttcctagagcacgttggaaacactctttttgtagtatctggatgaggacatttggagcgctttcaggcgtatggtgaaaaaggaaatatcttcccgtaaaaactagacagaagcattctcagaagtttatttgtgatgtgtgccctcaactaacagagttgaacctttcttttgatagagcagttttgaaacactctttttgtaaaatctgcaagaggatatttggatagctttgaggatttcgttgcaaacgggaatggcttcatataaactctagacagaagcattctcagaaacttcgttgggatgtttcgattgaagtcccagtgttgaacattcccttttatagagcaggttggaaacactctttctgcattccctggaagtggacatttggagcgctttcaggacgacggtgaaaatggaaatatcttccaagaaaatctagatagaagcaatgtcagaaacttttatgtgatggatctactcagctaacagagttgaacctttcttttgagagagcagttttgcaacactctttttgtggaatatgcaagtggatattagggcagctttgaggatttcgttggaaacgggaatacatgtaaaaagcagacagcagcattctcagaaacttctttgtgatgtttgcattgaagtcacagagttgaacattccctttgagagagcaggtttgaaacacgccttttgtcatatctggaagtgtccattcggagcgcattcaggcttgtgttgaaaaaggaaatatcctcccataaaaactagacagaagcattctcagaaacttatctgtgatgtatgtactcaactaacagaactaaaccatcgttttgaaggagcagttttgaaacactctttttgcggaatctgcaagtggatatttggctagctgggaggatttcgttggaaacgggattacatacaaaaagcagacagcagcattctcagaaacttctttgtgatgtttgcattcaagtcacagagttgaacattccctttcatagagcaggtttgaaacactctttttgcagtatctggatgtggacatttggatcgctttcaggcctatggtgaaaaaggaaatatcttcccatgaaaactagacagaagcattctcagaaacttatttgtgatgtgtgccctcaactgacagtgttgaacctttgttttgatagagcagttctgaaacacactttttgtaaaatctgcaagaggatatttggataggtttgaggatttcgttggaaacgggaatgtcttcatgtaaactctagacagaagcattctcagaaactgctttgggatgtttcaattgaagtcccagtgttgaacattcccattcatagagcaggtttgaaacactctttttgtactatctggaagtggacatttggagcgctttcaggtctacggtgaaaaaggagatatcttccaataaaaactagatagaagcaatgtcagaacttttttcatgatgtatctactcagcaaacagagttgaacctttcttttgagagagcagttttgaaacagtctttgtggaatatgcaagtgggtattaggccagcttggaggatttcgttggaaacgggaatacgtataaaaagcagacagcagcattgtcagaaactactttgtgatgtttgcattcaagtcacagaattgaacactccctttcacagagcaggtttgaaacactctttttgtagtgtctgtaagtgaacatatggattgctttcaggcctaaggtgaaaaaggaaatatcttcccataaaaactagacagaagcattctcagaaacttgtttgtgatgtgtgccctctactgacagagttgaacctttctttgcaaagagcagttttgaaacactctttttgtagaatctgcaagaggatatttggatagctttgaagatttcttgggaaacgggaatgtcttcagataaactctagacagaagcattctcagaaacttctttgggatgtttcaattgaagtcacagtgttgaacattccctttcacagagcaggtttgaaacactctttttgtagtgtgtataagtgaacatttggcgtgctttcaggcctaacgtgaaaaaggaaatatcttcccataaaaactagacagaagcattctcagaaacttgttcatgatgtgtgccctctactgacagagttgaacctttctttgcaaagagcagctttgaaacactctttttgtagaatctgcaagaggatatttggatagcttggaggatttcgttggaaacgggtatgtcttcagataaactctagacagaagcattctcagaaacttctttgggatgttgcattcaagtcacagagtagaacattcccattcatagagcagatttgaaacactctttttgtagtatctggaagtggacatttggagcgctttcaggcctatgttgaaaaaggaaatatcttcccataaaaactagacggaagcattctcagaaacttatttgtgatgtgtttgctcaactaacaggattgaaccatcgttttgaaggagcagttttgaaactctgttttcgtggaatctgcaagtggatatttggctagctttgaggatttcgttggaaacgggattacatataaaaaggagacagcagcattctcagaaacttctttgtgatgtctgcattcaattcacagagttgagcattccctttcatagagcaggttggaaacactctttttgtagtatctggatgaggacatttggagcgctttcaggcctatggtgaaaaaggaaatatcttcccgtaaaaactagacagaagcattctcagaagtttatttgtgatgtgtgccctcaactaacagagttgaacctttcttttgatagagcagttttgaaacactctttttgtaaaatctgcaagaggatatttggatagctttgaggatttccttgcaaacgggaatggcttcatataaactctagacagaagcattctcagaaacttcgttgggatgtttcgattgaagtcccagtgttgaacattcccttttatagagcaggttggaaacactctttctgcattccctggaagtggacatttggagcgctttcaggacgacggtgaaaatggaaatatcttccaagaaaatctagatagaagcaatgtcagaaacttttatgtgatggatctactcagctaacagagttgaacctttcttttgagagagcagttttgcaacactctttttgtggaatatgcaagtggatattagggcagctttgaggatttcgttggaaacgggaatacatgtaaaaagcagacagcagcattctcagaaacttctttgtgatgtttgcattgaagtcacagagttgaacattccctttgagagagcaggtttgaaacacgccttttgtcatatctggaagtgtccattcggagcgcattcaggcttgtgttgaaaaaggaaatatcctcccataaaaactagacagaagcattctcagaaacttatctgtgatgtatgtactcaactaacagaactaaaccatcgttttgaaggagcagttttgaaacactctttttgcggaatctgcaagtggatatttggctagctgggaggatttcgttggaaacgggattacatacaaaaagcagacagcagcattctcagaaacttctttgtgatgtttgcattcaagtcacagagttgaacattccctttcatagagcaggtttgaaacactctttttgtagtatctggatgtggacatttggatcgctttcaggcctatggtgaaaaaggaaatatcttcccatgaaaactagacagaagcattctcagaaacttatttgtgatgtgtgccctcaactgacagtgttgaacctttgttttgatagagcagttctgaaacacactttttgtaaaatctgcaagaggatatttggatagctttgaggatttcgttggaaacgggaatgtcttcatgtaaactctagacagaagcattctcagaaactgctttgggatgtttcaattgaagtcccagtgttgaacattccctttcatagagcaggtttgaaacactctttttgtagtatctggatgaggacatttggagcgctttcaggcgtttggtgaaaaaggaaatatcttcccgtaaaaactagacagaagcattctcagaagtttatttctgatgtgtgccctcaactaacagagttgaacctttcttttgatagagcagttttgaaacactctttttgtaaaatctgcaagaggatatttggatagctttgaggatttcgttgcaaacgggaatggcttcatataaactctagacagaagcattctcagaaacttcgttgggatgtttcgattgaagtcccagtgttgaacattcccttttatagagcaggttggaaacactctttttgcattccctggaagtggacatttggagcgctttcaggacgacggtgaaaatggaaatatcttccaagaaaatctagatagaagcaatgtcagaaacttttatgtgatggatctactcagctaacagagttgaacctttcttttgagagagcagttttgcaacactctttttgtggaatatgcaagtggatattagggcagctttgaggatttcgttggaaacgggaatacatgtaaaaagcagacagcagcattctcagaaacttctttgtgatgtttgcattgaagtcacagagttgaacattccctttgagagagcaggtttgaaacacgccttttgtcatatctggaagtgtccattcggagcgcattcaggcttgtgttgaaaaaggaaatatcctcccagaaaaactagacagaagcattctcagaaacttatttgtgatgtatgtactcaactaacagaactaaaccatcgttttgaaggagcagttttgaaacactctttttgcggaatctgcaagtggatatttggctagctgggaggatttcgttggaaacgggattacatacaaaaagcagacagcagcattctcagaaacttatttgtgatgtgtgccctcaactgacagtgttgaacctttgttttgatagagcagttctgaaacacactttttgtaaaatctgcaagaggatatttggatagctttgaggatttcgttggaaacgggaatgtcttcatgtaaactctagacagaagcattctcagaaactgctttgggatgtttcaattgaagtcccagtgttgaacattcccattcatagagcaggtttgaaacactctttttgtagtatctggaagtggacatttggagggatttcaggtctacggtgaaaaaggagatatcttccaataaaaactagatagaaagcaatgtcagaacttttttcatgatgtatctactcagcaaacagtagttgaacctttcttttgagagagcagttttgaaacactctttttgtggaatatgcaagtgggtattaggccagcttggaggatttcgttggaaacgggaatacgtataaaaagcagacagcagcattgtcagaaactactttgtgatgtttgcattcaagtcacagaattgaacactccctttcacagagcaggtttgaaacactctttttgtagtgtctgtaagtgaacatttggattgctttcaggcctaaggtgaaaaaggaaatatcttcccataaaaactagacagaagcattctcagaaacttgtttgtgatgtgtgccctctactgacagagttgaacctttctttgcaaagagaagttttgaaacactctttttgtagaacctgcaagaggatatttggatagctttgaggatttcttgggaaacgggaatgtcttcagataaactctagacagaagcattctcagaaacttctttgggatgtttcaattgaagtcacagtgttgaacattccctttcacagagcaggtttgaaacactctttttgtagtgtctataagtgaacatttggcgtgctttcaggcgtaacgtgaaaaaggaaatatcttcccataaaaaccagacagaagcattctcagaaacttgtttgtgatgtgtgccctctactgacagagttgaacctttctttgcaaagagcagctttgaaacactctttttgtagaatctgcaagaggatatttggatagctttgaggatttcgttggaaacgggtatgttttcagataaactctagacagaagcattctcagaaacttctttgggatgttgcattcaagtcacagagtagaacattcccattcatagagcagatttgaaacactctttttgtagtatctggaagtggacatttggagcgctttcaggcctatgttgaaaaaggaaatatcttcccataaaaactagacggaagcattctcagaaacttatttgtgatgtgtttgctcaactaacaggattgaaccatcgttttgaaggagcagttttgaaacactgttttcgtggaatctgcaagtggatatttggctagctttgaggatttcgttggaaacgggattacatataaaaaggagacagcagcattctcagaaacttctttgtgatgtctgcattcaattcacagagttgagcattccctttcatagagcacgttggaaacactctttttgtagtatctggatgaggacatttggagcgctttcaggcatatggtgaaaaaggaaatatcttcccgtaaaaactagacagaagcattctcagaagtttatttgtgatgtgtgccctcaactaacagagttgaacctttcttttgatagagcagttttgaaacactctttttgtaaaatctgcaagaggatatttggatagctttgaggatttcgttgcaaacgggaatggcttcatataaactctagacagaagcattctcagaaacttcgttgggatgtttcgattgaagtcccagtgttgaacattcccttttatagagcaggttggaaacactctttctgcattccctggaagtggacatttggagcgctttcaggacgacggtgaaaatggaaatatcttccaagaaaatctagatagaagcaatgtcagaaacttttatgtgatggatctactcagctaacagagttgaacctttcttttgagagagcagttttgcaacactctttttgtggaatatgcaagtggatattagggcagctttgaggatttcgttggaaacgggaatacatgtaaaaagcagacagcagcattctctgaaacttctttgtgatgtttgcattgaagtcacagagttgaacattccctttgagagagcaggtttgaaacacgccttttgtcatatctggaagtgtccattcggagcgcattcaggcttgtgttgaaaaaggaaatatcctcccataaaaactagacagaagcattctcagaaacttatttgtgatgtatgtactcaactaacagaactaaaccatcgttttgaaggagcagttttgaaacaccctttttgcggaatctgcaactggatatttggctagcttggaggatttcgttggaaacgggattacatacaaaaagcagacagcagcattctcagaaacttctttgtgatgtttgcattcaagtcgcagagttgaacattccctttcatagagcaggtttgaaacactctttttgtagtatctggatgtggacatttggatcgctttcaggcctatggtgaaaaaggaaatatcttcccatgaaaactagacagaagcattctcagaaacttatttgtgatgtgtgccctcaactgacagtgttgaacctttgttttgatagagcagttctgaaacacactttttgtaaaatctgcaagaggatatttggatagctttgaggatttcgttggaaacgggaatgtcttcatgtaaactctagacagaagcattctcagaaactgctttgggatgtttcaattgaagtcccagtgttgaacattccctttcatagagcaggtttgaaacactctttttgtagtatgtggaagtggacatttggagcgctttcaggtctacggtgaaaaaggagatatcttccaataaaaactagatagaagcaatgtcagaacttttttcatgatgtatctactcagcaaacagagttgaacctttcttttgagagagcagttttgaaacactctttttgtggaatatgcaagtgggtattaggccagcttggaggatttcgttggaaacgggaatacgtataaaaagcagacagcagcattgtcagaaactactttgtgatgtttgcattcaagtcacagaattgaacactccctttcacagagcaggtttgaaacactctttttgtagtgtctgtaagtgaacatatggattgctttcaggcctaaggtgaaaaaggaaatatcttcccataaaaactagacagaagcattctcagaaacttgtttgtgatgtgtgccctctactgacagagttgaacctttctttgcaaagagcagttttgaaacacactttttgtagaatctgcaagaggatatttggatagctttgaggatttcttgggaaacgggaatgtcttcagataaactctagacagaagcattttcagaaacttcttgggatatttcaattgaagtcacagtgttgaacattccctttcacagagcaggtttgaaacactctttttgtagtgtctataagtgaacatttggcgtgctttcaggcctaacgtgaaaaaggaaatatcttcccataaaaactagacagaagcattctcagaaacttgttcgtgatgtgtgccctctactgacagagttgaacctttctttgcaaagagcagctttgaaacattctttttgtagaatctgcaagaggatatttggatagctttgaggatttcgttggaaacgggtatgtcttcagataaactctagacagaagcattctcagaaacttctttgggatgttgcatgcaagtcacagagtagaacattcccattcatagagcagatttgaaacactctttttgtagtatctggaagtggacatttggagcgctttcaggcctatgttgaaaaaggaaatatcttcccataaaaactagacggaagcattctcagaaacttatttgtgatgtgtttgctcaactaacaggattgaaccatcgttttgaaggagcagttttgaaacactgttttcgtggaatctgcaagtggatatttggctagctttgaggatttcgttggaaacgggattacatataaaaaggagacagcagcattctcagaaacttctttgtgatgtctgcattcaattcacagagttgagcattccctttcatagagcacgttggaaacactctttttgtagtatctggatgaggacatttggagcgctttcaggcgtatggtgaaaaaggaaatatcttcccgtaaaaactagacagaagcattctcagaagtttatttgtgatgtgtgccctcaactaacagagttgaacctttcttttgatagagcagttttgaaacactctttttgtaaaatctgcaagaggatatttggatagctttgaggatttcgttgcaaacgggaatggcttcatataaactctagacagaagcattctcagaaacttcgttgggatgtttcgattgaagtcccagtgttgaacattcccttttatagagcaggttggaaacactctttctgcattccctggaagtggacatttggagcgctttcaggacgacggtgaaaatggaaatatcttccaagaaaatctagatagaagcaatgtcagaaacttttatgtgatggatctactcagctaacagagttgaagctttcttttgagagagcagttttgcaacactctttttgtggaatatgcaagtggatattagggcagctttgaggatttcgttggaaacgggaatacatgtaaaaagcagacagcagcattctcagaaatttctttgtgatgtttgcattgaagtcacagagttgaacattccctttgagagagcaggtttgaaacacgccttttgtcatatctggaagtgtccattcggagcgcattcaggcttgtgttgaaaaaggaaatatcctcccataaaaactagacagaagcattctcagaaacttatctgtgatgtatgtactcaactaacagaactaaaccatcgttttgaaggagcagttttgaaacactctttttgcggaatctgcaagtggatatttggctagctgggaggatttcgttggaaacgggattacatacaaaaagcagagagcagcattctcagaaacttatttgtgatgtgtgcactcaactgacagtgttgaacctttgttttgatagagcagttctgaaacacactttttgtaaaatctgcaagaggatatttggatagctttgaggatttcgttggaaacgggaatgtcttcatgtaaagtctagacagaagcattctcagaaactgctttgggatgtttcaattgaagtcccagtgttgaacattcccattcatagagcaggtttgaaacactctttttgtactatctggaagtggacatttggagcgctttcaggtctacggtgaaaaaggagatatcttccaataaaaactagatagaagcaatgtcagaacttttttcatgatgtatctactcagctaacagagttgaacctttcttttgagagagcagttttgaaacactctttttgtggaatatgcaagtgggtattaggccagcttggaggatttcgttggaaacgggaatacgtataaaaagcagacagcagcattgtcagaaactactttgtgatgtttgcattcaagtcacagaattgaacactccctttcacagagcaggtttgaaacactctttttgtagtgtctgtaagtgaacatttggattgatttcaggcctaaggtgaaaaaggaaatatcttcccataaaaactagacagaagcattctcagaaacttgtttgtgatgtgtgccctctactgacagagttgaacctttctttgcaaagagcagttttgaaacactctttttgtagaatctgcaagaggatatttggatagctttgaggatttcttgggaaacgggaatgtcttcagataaactctagacagaagcattctcagaaacttctttgggatatttcaattgaagtcacagtgttgaacattccctttcacagagcaggtttgaaacactctttttgtagtgtctataagtgaacatttggcgtgctttcaggcctaacgtgaaaaaggaaatatcttcccataaaaactagacaaaagcattctcagaaacttgttcgtgatgtgtgccctctactgacagagttgaacctttctttgcaaagagcagctttgaaacactctttttgtagaatctgcaagaggatatttggatagctttgaggatttcgttggaaacgggtatgtcttcagataaacttagacagaagcattctcagaaacttctttgggatgttgcattcaagtcacagagtagaacattcccattcatagagcagatttgaaacactctttttgtagtatctggaagtggacatttggaacgctttcaggcctatgttgaaaaaggatatatcttcccataaaaactagacggaagcattctcagaaacttacttgtgatgtgtttgctcaactaacagaattgaaccatcgttttgaaggagcagttttgaaacactgttttcgtggaatctgcaagtggatatttggctagctttgaggatttcgttggaaacgggattacatataaaaaggagacagcagcattctcagaaacttctttgtgatgtctgcattcaagtcacagagttgagcattccctttcatagagcaggttggaaacactctttttgtagtatctggatgaggacatttggagcgctttcaggcgtatggtgaaaaaggaaatatcttcccgtaaaaactagacagaagattctcagaaatttatttgtgatgtgtgccctcaactaacagagttgaacctttcttttgatagagcagttttgaaacactctttttgtaaaatctgcaagaggatatttggatagctttgaggatttcgttgcaaacgggaatggcttcatataaactctagacagaagcattctcagaaacttcgttgggatgtttcgattgaagtcccagtgttgaacattcccttttatagagcaggttggaaacactctttctgcattccctggaagtggacatttggagcgctttcaggacgacggtgaaaatggaaatatcttccaagaaaatctagatagaagcaacgtcagaaacttttctgtgatggatctactcagctaacagagttgaacctttcttttgagagagcagttttgcaacactctttttgtggaatatgcaagtggatattagggcagctttgaggatttcgttggaaacgggaatacatgtaaaaagcagacagcagcattctcagaaacttctttgtgatgtttgcattgaagtcacagagttgaacattccctttgagagagcaggtttgaaacacgccttttgtcatatctggaagtgtccattcggagcgcattcaggcttgtgttgaaaaaggaaatatcctcccataaaaactagacagaagcattctcagaaacttatctgtgatgtatgtactcaactaacagaactaaaccatcgttttgaaggagcagttttgaaacactctttttgcggaatctgcaagtggatatttggctagctgggaggatttcgttggaaacgggattacatacaaaaagcagacagcagcattctcagaaacttctttgtgatgtttgcattcaagtcacagagttgaacattccctttcatagagcaggtttgaaacactctttttgtagtatctggatgtggacatttggatcgctttcaggcctatggtgaaaaaggaaatatcttcccatgaaaactagacagaagcattctcagaaacttatttgtgatgtgtgccctcaactgacagtgttgaacctttgttttgatagagcagttctgaaacacactttttgtaaaatctgcaagaggatatttggatagctttgaggatttcgttggaaacgggaatgtcttcatgtaaactctacacagaagcattctcagaaactgctttgggatgtttcaattgaagtcccagtgttgaacattcccattcatagagcaggtttgaaacactctttttgtactatctggaagtggacatttggagcgctttcaggtctacggtgaaaaaggagatatcttccaataaaaactagatagaagcaatgtcagaacttttttcatgatgtatctactcagcaaacagagttgaacctttcttttgagagagcagttttgaaacactctttttgtggaatatgaaagtgggtattaggccagcttggaggatttcgttggaaacgggaatacgtataaaaagcagacagcagcattgtcagaaactactttgtgatgtttgcattcaagtcacagaactgaacactccctttcacagagcaggtttgaaacactctttttgtagtgtctgtaagtgaacatttggattgctttcaggcctaaggtgaaaaaggaaatatcttcccataaaaactagacagaagcattctcagaaacttgtttgtgatgtgtgccctctactgacagagttgaacctttctttgcaaagagcagttttgaaacactctttttgtagaatctgcaagaggatatttggatagctttgaggatttcttgggaaacgggaatgtcttcagataaactctagacagaagcattctcagaaacttctttgggatgtttcaattgaagtcacagtgttgaacattccctttcacagagcaggtttgaaacactctttttgtagtgtctataattgaacatttggcgtgctttcaggcctaacgtgaaaaaggaaatatcttcccatacaaaactagacagaagcattctcagaaacttgttcgtgatgtgtgccctctactgacagagttgaacctttctttgcaaagagcagctttgaaacactctttttgtagaatctgcaagaggatatttggatagcttggaggatttcgttggaaacgggtatgtcttcagataaactctagacagaagcattctcagaaacttctttgggatgttgcattcaagtcacagagtagaacattcccattcatagagcagatttgaaacactctttttgtagtatctggaagtggacatttggagcgctttcaggcctatgttgaaaaaggaaatatcttcccataaaaactagacggaagcaatctcagaaacttatttgtgatgtgtttgctcaactaacaggattgaaccatcgttttgaaggagcagttttgaaacactgttttcgtggaatctgcaagtggatatttggctagctttgaggatttcgttggaaacgggattacatataaaaaggagacagcagcattctcagaaacttctttgtgatgtctgcattcaattcacagagttgagcattccctttcatagagcaggttggaaacactctttttgtagtatctggatgtggacatttggatcgctttcaggcctatggtgaaaaaggaaatatcttcccatgaaaactagacagaagcattctcagaaacttatttgtgatgtgtgcactcaactgacagtgttgaacctttgttttgatagagcagttctgaaacacaatttttgtaaaatctgcaagaggatatttggatagctttgaggatttcgttggaaacgggaatgtcttcatgtaaactctagacagaagcattctcagaaactgctttgggatgtttcaattgaagtcccagtgttgaacattcccattcatagagcaggtttgaaacactctttttctactatctggaagtggacatttggagcgctttcaggtctacggtgaaaaaggagatatcttacaataaaaactagatagaagcaatgtcagaacttttttcatgatgtatctactcagcaaacagagttgaacctttcttttgagagagcagttttgacactgtctttgtggaatatgcaagtgggtattaggccagcttggaggatttcgttggaaacgggaatacgtataaaaagcagacagcagcattgtcagaaactactttgtgatgtttgcattcaagtcacagaattgaacactccctttcacagagcaggtttgaaacactctttttgtagtgtctgtaagtgaacatttggattgctttcaggcctaaggtgaaaaaggaaatatcttcccataaaaactagacagaagcattctcagaaacttgtttgtgatgtgtgccctctactgacagagttgaacctttctttgcaaagagcagttttgaaacagtctttttgtagaatctgcaagaggatatttggatagctttgaggatttcttgggaaacgggaatgtcttcagataaactctagacagaagcattctcagaaacttctttgggatgtttcaattgaagtcacagtgttgaacattccctttcacagagcaggtttcaaacactctttttgtagtgtctataagtgaacatttggcgtgctttcaggcctaacgtgaaaaaggaaatatcttcccataaaaactagacagaagcattctcagaaatttgttcgtgatgtgtgccctctactgacagagttgaacctttctttgcaaagagcagctttgaaacacactttttgtagaatctgcaagaggatatttggatagctttgaggatttcgttggaaacgggtatgtcttcagataaactctagacagaagcattctcagaaacttctttgggatgttgcatgcaagtcacagagtagaacattcccattcatagagcagatttgaaacactctttttgtagtatctggaagtggacatttggagcgctttcaggcctatgttgaaaaaggaaatatcttcccataaaaactagacggaagcattctcagaaacttatttgtgatgtgtttgctcaactaacaggattgaaccatcgttttgaaggagcagttttgaaacactgttttcgtggaatctgcaagtggatatttggctagctttgaggatttcgttggaaacgggattacatataaaaaggagacagcagcattctcagaaacttctttgtgatgtctgcattcaattcacagagttgagcattccctttcatagagcaggttggaaacactctttttgtagtatctggatgaggacatttggagcgctttcaggcgtatggtgaaaaaggaaatatcttcccgtaaaaactagacagaagcattctcagaagtttatttgtgatgtgtgccctcaactaacagagttgaacctttcttttgatagagcagttttgaaacactctttttgtaaaatctgcaagaggatatttggatagctttgaggatttcgttgcaaacgggaatggcttcatataaactctagacagaagcattctcagaaacttcgttgggatgtttcgattgaagtcccagtgttgaacattcccttttatagagcaggttggaaacactctttttgcattccctggaagtggacatttggagcgctttcaggacgacggtgaaaatggaaatatcttccaagaaaatctagatagaagcaatgtcagaaacttttatgtgatggatctactcagctaacagagttgaacctttcttttgagagagcagttttgcaacactctttttgtggaatatgcaagtggatattagggcagctttgaggatttcgttggaaacgggaatacatgtaaaaagcagacagcagcattctcagaaacttctttgtgatgtttgcattgaagtcacagcagttgaacattccctttgagagagcaggtttgaaacacgccttttgtcatatctggaagtgtccattcggagcgcattcaggcttgtgttgaaaaaggaaatatcctcccataaaaactagacagaagcattctcagaaacttatctgtgatgtatgtactcaactaacagaactaaaccatcgttttgaaggagcagttttgaaacactctttttgcggaatctgcaagtggatatttggctagctgggaggatttcgttggaaacgggattacatacaaaaagcagacagcagcattctcagaaacttctttgtgatgtttgcattcaagtcacagagttgagcattccctttcatagagcaggttggaaacactctttttgtagtatctggatgtggacatttggatcgctttcaggcgtatggtgaaaaaggaaatatcttcccatgaaaactagacagaagcattctcagaaacttatttgtgatgtgtgccctcaactgacagtgttgaacctttgttttgatagagcagttctgaaacacactttttgtaaaatctgcaagaggatatttggatagctttgaggatttcgttggaaacgggaatgtcttcatgtaaactctagacagaagcattctcagaaactgctttgggatgtttcaattgaagtcccagtgttgaacattcccattcatagagcaggtttgaaacactctttttgtactatctggaagtggacatttggagcgctttcaggtctacggtgaaaaaggagatatcttaaaataaaaactagatagaagcaatgtcagaacttttttcatgatgtatctactcagcaaacagagttgaacctttcttttgagagagcagttttgaaacactctttttgtggaatatgcaagtgggtattaggccagcttggaggatttcgttggaaacgggaatacgtataaaaagcagacagcagcattgtcagaaactactttgtgatgtttgcattcaagtcacagaattgaacactccctttcacagagcaggtttgaaacactctttttgtagtgtctgtaagtgaacatttggattgctttcaggcctaaggtgaaaaaggaaatatcttcccataaaaactagacagaagcattctcagaaacttgtttgtgatgtgtgccctctactgacagagttgaacctttctttgcaaagagcagttttgaaacactctttttgtagaatctgcaagaggatatttggatagctttgaggatttcttgggaaacgggaatgtcttcagataaactctagacagaagcattctcagaaacttctttgcgatgtttcaattgaagtcacagtgttgaacattccctttcacagagcaggtttgaaacactctttttgtagtgtctataagtgaacatttggcgtgctttcaggcctaacgtgaaaaaggaaatatcttcccaaaaaaactagacagaagcattctcagaaacttgttcttgatgtgtcccctctactgacagagttgaacctttctttgcaaagagcagctttgaaacactctttttgtagaatctgcaagaggatatttggatagcttggaggatttcgttggaaacgggtatgtcttcagataaactctagacagaagcattctcagaaacttctttgggatgttgcattcaagtcacagagtagaacattcccattcatagagcagatttgaaacactctttttgtagtatctggaagtggacatttggagcgctttcaggcctatgttgaaaaaggaaatatcttcccataaaaactagacggaagcattctcagaaacttatttgtgatgtgtttgctcaactaacaggattgaaccatcgttttgaaggagcagttttgaaacactgttttcgtggaatctgcaagtggatatttggctagctttgaggatttcgttggaaatgggattacatatacaaaggagacagcagcattctcagaaacttctttgtgatgtctgcattcaattcacagagttgagcattccctttcatagagcaggttggaaacactctttttgtagtatctggatgaggacatttggagcgctttcaggcgtatggtgaaaaaggaaatatcttcccgtaaaaactagacagaagcattctcagaaatttatttgtgatgtgtgccctcaactaacagagttgaacctttcttttgatagagcagttttgaaacactctttttgtaaaatctgcaagaggatatttggatagctttgaggatttcgttgcaaacgggaatggcttcatataaactctagacagaagcattctcagaaacttcgttgggatgttttgattgaagtcccagtgttgaacattcccttttatagagcaggttggaaacactctttctgcattccctggaagtggacatttggagcgctttcaggacgacggtgaaaatggaaatatcttccaataaaatctagatagaagcaacgtcagaaacttttctgtgatggatctactcagctaacagagttgaacctttcttttgagagagcagttttgcaacactctttttgtggaatatgcaagtggatattagggcagctttgaggatttcgttggaaacgggaatacatgtaaaaagcagacagcagcattctcagaaacttctttgtgatgtttgcattgaagtcacagagttgaacattccctttgagagagcaggtttgaaacacgccttttgtcatatctggaagtgtccattcggagcgcattcaggcttgtgttgaaaaaggaaatatcctcccataaaaactagacagaagcattctcagaaacttatctgtgatgtatgtactcaactaacagaactaaaccatcgttttgaaggagcagttttgaaacactctttttgcggaatctgcaagtggatatttggctagctgggaggatttcgttggaaacgggattacatacaaaaagcagacagcagcattctcagaaacttctttgtgatgtttgcattcaagtcacagagttgaacattccctttcatagagcaggtttgaaacactctttttgtagtatctggatgtggacatttggatcgctttcaggcctatggtgaaaaaggaaatatcttcccatgaaaactagacagaagcattctcagaaacttatttgtgatgtgtgccctcaactgacagtgttgaacctttgttttgatagagcagttctgaaacacactttttgtaaaatctgcaagaggatatttggatagctttgaggatttcgttggaaacgggaatgtcttcatgtaaactctacacagaagcattctcagaaactgctttgggatgtttcaattgaagtcccagtgttgaacattcccattcatagagcaggtttgaaacactctttttgtagtatctggaagtggacatttggagcgctttcaggtctacggtgaaaaaggagatatcttccaataaaaactagatagaagcaatgtcagaacttttttcatgatgtatctactcagcaaacagagttgaacctttcttttgagagagcagttttgaaacactccttttgtggaatatgcaagtgggtattaggccagcttggaggatttcgttggaaacgggaatacgtataaaaagcggacagcagcattctcagaaactactttgtgatgtttgcattcaagtcacagaattgaacactccctttcacagagcaggtttgaaacactctttttgtagtgtctgtaagtgaacatttggattgctttcaggcctaaggtgaaaaaggaaatatcttcccataaaaactagacagaagcattctcagaaacttgtttgtgatgtgtgccctctactgacagagttgaacctttctttgcaaagaccagttttgaaacactctttttgtagaatctgcaagaggatatttggatagctttgaggatttcttgggaaacgggaatgtcttcagataaactctagacagaagcattctcagaaacttctttgggatgtttcaattgaagtcacagtgttgaacattccctttcacagagcaggtttgaaacactctttttgtagtgtctataagtgaacatttggcgtactttcaggcctaacgtgaaaaaggaaatatcttcccataaaaactagatagaagcattctcagaaatttgttcgtgatgtgtgccctctactgacagagttgaacctttctttgcaaagagcagctttgaaacacactttttgtagaatctgcaagaggatatttggatagctttgaggatttcgttggaaacgggtatgtcttcagataaactctagacagaagcattctcagaaacttctttgggatgttgcattcaagtcacagagtagaacattcccattcatagagcagatttgaaacactctttttgtagtatctggaagtggacatttggagcgctttcaggcctatgttgaaaaaggaaatatcttcccataaaaactagacggaagcattctcagaaacttatttgtgatgtgtttgctcaactaacaggattgaaccatcgttttgaaggagcagttttgaaacactgttttcgtggaatctgcaagtggatatttggctagctttgaggatttcgttggaaacgggattacatatacaaaggagacagcagcattctcagaaacttctttgtgatgtctgcattcaattcacagagttgagcattccctttcatagagcaggttggaaacactctttttgtagtatctggatgaggacatttggagcgctttcaggcgtatggtgaaaaaggaaatatcttccctgtaaaaactagacagaagcattctcagaagtttatttgtgatgtgtgccctcaactaacagagttgaacctttcttttgatagagcagttttgaaacactctttttgtaaaatctgcaagaggatatttggatagctttgaggatttcgttgcaaacgggaatggcttcatataaactctagacagaaagcattctcagaaacttcgttgggatgtttcgattgaagtcccagtgttgaacattcccttttatagagcaggttggaaacactctttctgcattccctggaagtgtacatttggagcgctttcaggacgacggtgaaaatggaaatatcttccaagaaaatctagatagaagcaacgtcagaaacttttatgtgatggatctactcagctaacagagttgaacctttcttttgagagagcagttttgcaacactctttttgtggaatatgcaagtggatattagggcagctttgaggatttcgttggaaacgggaatacatgtaaaaagcagacagcagcattctcagaaacttctttgtgatgtttgcattgaagtcacagagttgaacattccctttgagagagcaggattgaaacacgccttttgtcatatctggaagtgtccattcggagcgcattcaggcttgtgttgaaaaaggaaatatcctcccagaaaaactagacagaagcattctcagaaacttatctgtgatgtatgtactcaactaacagaactaaaccatcgttttgaaggagcagttttgaaacactctttttgcggaatctgcaagtggatatttggctagctgggaggatttcgttggaaacgggattacatacaaaaagcagacagcagcattctgagaaacttctttgtgatgtctgcattcaattcacagaagctgagcattccctttcatagagcaggttggaaacactctttttgtagtatctggatgtggacatttggttcgctttcaggcctatggtgaaaaaggaaatatcttcccatgaaaactagacagaagcattctcagaaacttatttgtgatgtgtgccctcaactgacagtgttgaacctttgttttgatagagcagttctgaaacacactttttgtaaaatctgcaagaggatatttggatagctttgaggatttcgttggaaacgggaatgtcttcatgtaaactctacacagaagcattctcagaaactgctttgggatgtttcaattgaagtcccagtgttgaacattcccattcatagagcaggtttgaaacactctttttgtactatctggaagtggacatttggagcgctttcaggtctacggtgaaaaaggagatatcttccaataaaaactagatagaagcaatgtcagaacttttttcatgatgtatctactcagcacacagagttgaacctttcttttgagagagcagttttgaaacactctttttgtggaatatgcaagtgggtattaggccagcttggaggatttcgttggaaacgggaatacgtataaaaagcagacagcagcattgtcagaaactactttgtgatgtttgcattcaagtcacagaattgaacactccctttcacagagcaggtttgaaacactctttttgtagtgtctgtaagtgaacatatggattgctttcaggcctaaggtgaaaaaggaaatatcttcccataaaaactagacagaagcattctcagaaacttgtttgtgatgtgtgccctctactgacagagttgaacctttctttgcaaagaccagttttgaaacactctttttgtagaatctgcaagaggatatttggatagctttgaggatttcttgggaaacgggaatgtcttcagataaactctagacagaagcattctcagaaacttctttgggatgtttcaattgaagtcacagtgttgaacattccctttcacagagcaggtttgaaacactctttttgtagtgtctataagtgaacatttggcgtgctttcaggcctaacgtgaaaaaggaaatatcttcccataaaaactagacagaagcattctcagaaacttgttcttgatgtgtcccctctactgagagagttgaacctttctttgcaaagagcagctttgaaacactctttttgtagaatctgcaagaggatatttggatagcttggaggatttcgttggaaacgggtatgtcttcagataaactctagacagaaacattctcagaaacttctttgggatgttgcattcaagtcacagagtagaacattcccatgcatagagcagatttgaaacactctttttgtagtatctggaagtggacatttggagcgctttcaggcctatgttgaaaaaggaaatatcttcccataaaaactagacgggaagcattctcagaaacttacttgtgatgtgtttgctcaactaacaggattgaaccatcgttttgaaggagcagttttgaaacacagttttcgtggaatctgcaagtggatatttggctagctttgaggatttcgttggaaacgggattacatataaaaaggagacagcagcattctcagaaacttctttgtgatgtttgcattcaagtcacagagttgaacattccctttcatagagcaggtttgaaacactctttttgtagtatctggatgtggacatttggatcgctttcaggcctatggtgaaaaaggaaatatcttcccatgaaaactagacagaagcattctcagaaacttatttgtgatgtgtgccctcaactgacagtgttgaacctttgttttgatagagcagttctgaaacacactttttgtaaaatctgcaagaggatatttggatagctttgaggatttcgttggaaacgggaatgtcttcatgtaaactctagacagaagcattctcagaaactgctttgggatgtttcaattgaagtcccagtgttgaacattcccattcatagagcaggtttgaaacactctttttgtactatctggaagtggacatttggagcgctttcaggtctacggtgaaaaaggagatatcttccaataaaaactagatagaagcaatgtcagaacttttttcatgatgtatctactcagcaaacagagttgaacctttcttttgagagagcagttttgaaacactctttttgtggaatatgcaagtgggtattaggccagcttggaggatttcgttggaaacgggaatacgtataaaaagcagacagcagcattgtcagaaactactttgtgatgtttgcattcaagtcacagaattgaacactccctttcacagagcaggtttgaaacactctttttgtagtgtctgtaagtgaacatttggattgctttcaggcctaaggtgaaaaaggaaatatcttcccataaaaactagacagaagcattctcagaaacttgtttgtgatgtgtgccctctactgacagagttgaacctttctttgcaaagagcagttttgaaacactctttttgtagaatctgcaagaggatatttggatagctttgaagatttcttgggaaacgggaatgtcttcagataaactctagacaggaagcattctcagaaacttctttgggatgtttcaattgaagtcacagtgttgaacattccctttcacagagcaggtttgaaacactctttttgtagtgtctataagtgaacatttggcgtgctttcaggcgtaacgtgaaaaaggaaatatcttcccataaaaactagacagaagcattctcagaaacttgttcgtgatgtgtgccctctactgacagagttgaacctttctttgcaaagagcagctttgaaacacactttttgtagaatctgcaagaggatatttggatagctttgaggatttcgttggaaacgggtatgtcttcagataaactctagacagaagcattctcagaaacttctttgggatgttgcattcaagtcacagagtagaacattcccattcatagagcagatttgaaacactctttttgtagtatctggaagtggacatttggagcgctttcaggcctatgttgaaaaaggaaatatcttcccataaaaactagacggaagcattctcagaaacttacttgtgatgtgtttgctcaactaacagaattgaaccatcgttttaaaggagcagttttgaaacactgttttcgtggaatctgcaagtggatatttggctagctttgaggatttcgttggaaacgggattacatataaaaaggagacagcagcattctcagaaacttctttgtgatgtctgcattcaattcacagagttgagcattccctttcatagagcaggttggaaacactctttttgtagtatctggatgaggacatttggagcgctttcaggcctatggtgaaaaaggaaatatcttcccgtaaaaactagacagaagcattctcagaaatttatttgtgatgtgtgccctcaactaacagagttgaacttttcttttgatacagcagttttgaaacactctttttgtaaaatctgctagaggatatttggatagctttgaggatttcgttgcaaacgggaatggcttcatataaactctagacagaagcattctcagaaacttcgttgggatgtttcgattgaagtcccagtgttgaacattcccttttatagagcaggttggaaacactctttctgcattccctggaagtggacatttggagcgctttcaggacgacggtgaaaatggaaatatcttccaagaaaatctagatagaagcaacgtcagaaacttttctgtgatggatctactcagctaacagagttgaacctttcttttgagagagcagttttgcaacactctttttgtggaatatgcaagtggatattagggcagctttgaggatttcgttggaaacgggaatacatgtaaaaagcagacagcagcattctcagaaacttctttgtgatgtttgcattgaagtcacagagttgaacattccctttgagagagcaggtttgaaacacgccttttgtcatatctggaagtgtccattcggagcgcattcaggcttgtgttgaaaaaggaaatatcctcccagaaaaactagacagaagcattctcagaaacttatctgtgatgtatgtactcaactaacagaactaaaccatcgttttgaaggagcagttttgaaacactctttttgcggaatctgcaagtggatatttggctagctgggaggatttcgttggaaacgggattacatacaaaaagcagacagcagcattctcagaaacttctttgtgatgtttgcattcaagtcacagagttgaacattccctttcatagagcaggtttgaaacactctttttgtagtatctggatgtggacatttggatcgctttcaggcctatggtgaaaaaggaaatatcttcccatgaaaactagacagaagcattctcagaaacttatttgtgatgtgtgccctcaactgacagtgttgaacctttgttttgatagagcagttctgaaacacactttttgtaaaatctgcaagaggatatttggatagctttgaggatttcgttggaaacgggaatgtcttcatgtaaactctggacagaagcattctcagaaactgctttgggatgtttcaattgaagtcccagtgttgaacattccctttcatagagcaggtttgaaacactctttttgtactatctggaagtggacatttggagcgctttcaggtctacggtgaaaaaggagatatcttccaataaaaactagatagaagcaatgtcagaacttttttcgtgatgtatctactcagcaaacagagttgaacctttcttttgagagagcagttttgaaacactctttttgtggaatatgcaagtgggtattaggccagcttggaggatttcgttggaaacgggaatacgtataaaaagcagacagcagcattgtcagaaactactttgtgatgtttgcattcaagtcacagaattgaacactccctttcacagagcaggtttgaaacactctttttgtagtgtctgtaagtgaacatttggattgctttcaggcctaaggtgaaaaaggaaatatcttcccataaaaactagacagaagcattctcagaaacttgtttgtgatgtgtgccctctactgacagagttgaaactttctttgcaaagagcagttttgaaacactctttttgtagaatctgcaagaggatatttggatagctttgaggatttcttgggaaacgggaatgtcttcagataaactctagacagaagcattctcagaaacttctttgggatgtttcaattgaagtcacagtgttgaacattccctttcacagagcaggtttgaaacactctttttgtagtgtctataattgaacatttggcgtgctttcaggcctaacgtgagaaaggaaatatcttcccataaaaactagacagaagcattctcagaaacttgttcgtgatgtgtgccctctactgacagagttgaacctttctttgcaaagagcagctttgaaacactctttttgtagaatctgcaagaggatatgtggatagctttgaggatttcgttggaaacgggtatgtcttcagataaactctagacagaagcattctcagaaacttctttgggatgtttcaattgaagtcacagtgttgaacattccctttcacagagcaggtttgaaacactctttttgtagtgtctataagtgaacatttggcgtgctttcaggcctaacgtgaaaaaggaaatatcttcccataaaaactagacagaagcattctcagaaacttgttcgtgatgtgtgccctctactgacagagttgaacctttctttgcaaagagcagctttgaaacactctttttgtagaatctgcaagaggatatttggatagctttgaggatttcgttggaaacgggtatgtcttcagataaactctagacagaagcattctcagaaacttctttgggatgttgcattcaagtcacagagtagaacattcccattcatacagcagatttgaaacactctttttgtagtatctggaagtggacatttggagcgctttcaggcctatgttgaaaaaggaaatatcttcccataaaaactagacggaagcattctcagaaacttacttgtgatgtgtttgctcaactaacagaattgaaccatcgttttgtaggagcagttttgaaacactgttttcgtggaatctgcaagtggatatttggctagctttgaggatttcgttggaaacgggattacatatacaaaggagacagcagcattctcagaaacttctttgtgatgtctgcattcaagtcacagagttgagcattccctttcatagagcaggttggaaacactctttttgtagtatctggatgaggacatttggagcgctttcaggcgtatggtgaaaaaggaaatatcttcccgtaaaaactagacagaagcattctcagaaatttatttgtgatgtgtgccctcaactaacagagttgaacctttcttttgatagagcagttttgaaacactctttttgtaaaatctgcaagaggatatttggatagctttgaggatttcgttgcaaacgggaatggcttcatataaactctagacagaagcattctcagaaacttcgttgggatgtttcgattgaagtcccagtgttgaacattcccttttatagagcaggttggaaacactctttctgcattccctggaagtggacatttggagcgctttcaggacgacggtgaaaatggaaatatcttccaagaaaatctagatagaagcaacgtcagaaacttttatgtgatggatctactcagctaacagagttgaacctttcttttgagagagcagttttgcaacactctttttgtggaatatgcaagtggatattagggcagctttgaggatttcgttggaaacgggaatacatgtaaaaagcagacagcagcattctcagaaacttctttgtgatgtttgcattgaagtcacagagttgaacatcccctttgagagagcaggtttgaaacacgccttttgtcatatctggaagtgtccattcggagcgcattcaggcttgtgttgaaaaaggaaatatcctcccataaaaactagacagaagcattctcagaaacttatctgtgatgtatgtactcaactaacagaactaaaccatcgttttgaagggcagttttgaaacactctttttgcggaatctgcaagtggatatttggctagctgggaggatttcgttggaaacgggattacatacaaaaagcagacagcagcattctcagaaacttctttgtgatgtttgcattcaagtcacagagttgaacattccctttcatagagcaggtttgaaacactctttttgtagtatctggatgtggacatttggatcgctttcaggcctatggtgaaaaaggaaatatcttcccatgaaaactagacagaagcattctcagaaacttatttgtgatgtgtgccctcaactgacagtgttgaacctttgttttgatagagcagttctgaaacacactttttgtaaaatctgcaagaggatatttggatagctttgaggatttcgttggaaacgggaatgtcttcatgtaaactctagacagaagcattctcagaaactgctttgggatgtttcaattgaagtcccagtgttgaacattcccattcatagagcaggtttgaaacactctttttctactatctggaagtggacatttggagcgctttcaggtctacggtgaaaaaggagatatcttccaataaaaactagatagaagcaatgtcagaacttttttcatgatgtatctactcagctaacagagttgaacctttcttttgagagagcagttttgaaacactctttttgtggaatatgcaagtgggtattaggccagcttggaggatttcgttggaaacgggaatacggtataaaaagcagacagcagcattgtcagaaactactttgtgatgtttgcattcaagtcacagaattgaacactccctttcacagagcaggtttgaaacactctttttgtagtgtctgtaagtgaacatatggattgctttcaggcctaaggtgaaaaaggaaatatcttcccataaaaactagacagaagcattctcagaaacttgtttgtgatgtgtgccctctactgacagagttgaacctttctttgcaaagagcagttttgaaacactctttttgtagaatctgcaagaggatatttggatagctttgaggatttacttgggaaacgggaatgtcttcagataaactctagacagaagcattctcagaaacttctttgggatgtttcaattgaagtcacagtgttgaacattccctttcacagagcaggtttgaaacactctttttgtagtgtctataagtgaacatttggcgtgctttcaggcctaacgtgaaaaaggaaatatcttcccataaaaactagacagaagcattctcagaaacttgttcttgatgtgtcccctctactgacagagttgaacctttctttgcaaagagcagctttgaaacactctttttgtagaatctgcaagaggatatttggatagcttggaggatttcgttggaaacgggtatgtcttcagataaactctagacagaagcattctcagaaacttctttgggatgttgcattcaagtcacagagtagaacattcccattcatagagcagatttgaaacactctttttgtagtatctggaagtggacatttggagcgctttcaggcctatgttgaaaaaggaaatatcttcccataaaaactagacggaagcattctcagaaacttaattgtgatgtgtttgctcaactaacaggattgaaccatcgttttgaaggagcagttttgaaacactgttttcgtggaatctgcaagtggatatttggctagctttgaggatttcgttggaaacgggattacatatacaaaggagacagcagcattctcagaaacttctttgtgatgtctgcattcaattcacagagttgagcattccctttcatagagcaggttggaaacactctttttgtagtatctggatgaggacatttggagcgctttcaggcgtatggtgaaaaaggaaatatcttcccgtaaaaactagacagaagcattctcagaagtttatttgtgatgtgtgccctcaactaacagagttgaacctttcttttgatagagcagttttgaaacactctttttgtaaaatctgcaagaggatatttggatagctttgaggatttcgttgcaaacgggaatggcttcatataaactctagacagaagcattctcagaaacttcgttgggatgtttcgattgaagtcccagtgttgaacattcccttttatagagcaggttggaaacactctttctgcattccctggaagtggacatttggagcgctttcaggacgacggtgaaaatggaaatatcttccaagaaaatctagatagaagcaatgtcagaaacttttatgtgatggatctactcagctaacagagttgaagctttcttttgagagagcagttttgcaacactctttttgtggaatatgcaagtggatattagggcagctttgaggatttcgttggaaacgggaatacatgtaaaaagcagacagcagcattctcagaaacttctttgtgatgtttgcattgaagtcacagagttgaacattccctttgagagagcaggtttgaaacacgccttttgtcatatctggaagtgtccattcggagcgcattcaggcttgtgttgaaaaaggaaatatcctcccataaaaactagacagaagcattctcagaaacttatctgtgatgtatgtactcaactaacagaactaaaccatcgttttgaaggagcagttttgaaacactctttttgcggaatctgcaagtggatatttggctagctgggaggatttcgttggaaacgggattacatacaaaaagcagacagcagcattctcagaaacttctttgtgatgtttgcattcaagtcacagagttgaacattccctttcatagagcaggtttgaaacactctttttgtagtatctggatgtggacatttggatcgctttcaggcctatggtgaaaaaggaaatatcttcccatgaaaactagacagaagcattctcagaaacttatttgtgatgtgtgccctcaactgacagtgttgaacctttgttttgatagagcagttctgaaacacactttttgtaaaatctgcaagaggatatttggatagctttgaggatttcgttggaaacgggaatgtcttcatgtaaactctagacagaagcattctcagaaactgctttgggatgtttcaattgaagtcccagtgttgaacattccctttcatagagcaggtttgaaacactctttttgtactatctggaagtggacatttggagcgctttcaggtctacggtgaaaaaggagatatcttccaataaaaactagatagaagcaatgtcagaacttttttcatgatgtatctactcagcaaacagagttgaacctttcttttgagagagcagttttgaaacactctttttgtggaatatgcaagtgggtattaggccagcttggaggatttcgttggaaacgggaatacgtataaaaagcagacagcagcattgtcagaaactactttgtgatgtttgcattcaagtcacagaattgaacactccctttcacagagcaggtttgaaacactctttttgtagtgtctgtaagtgaacatttggattgctttcaggcctaaggtgaaaaaggaaatatcttcccataaaaactagacagaagcattctcagaaacttgtttgtgatgtgtgccctctactgacagagttgaacctttctttgcaaagaccagttttgaaacactctttttgtagaatctgcaagaggatatttggatagctttgaggatttcttgggaaacgggaatgtcttcagataaactctagacagaagcattctcagaaacttctttgggatgtttcaattgaagtcacagtgttgaacattccctttcacagagcaggtttgaaacactctttttgtagtgtctataagtgaacatttggcgtgctttcaggcgtaacgtgaaaaaggaaatatcttcccataaaaaccagacagaagcattctcagaaacttgttcatgatgtgtgccctctactgacagagttgaacctttctttgcaaagagcagctttgaaacactctttttgtagaatctgcaagaggatatttggatagctttgaggatttcgttggaaacgggtatgtcttcagataaactctagacagaagcattctcagaaacttctttgggatgttgcattcaagtcacagagtagaacattcccattcatagagcagatttgaaacactctttttgtagtatctggaagtggacatttggagcgctttcaggcctatgttgaaaaaggaaatatcttcccataaaaactagacggaagcattctcagaaacttacttgtgatgtgtttgctcaactaacagaattgaaccatcgttttgaaggagcagttttgaaacaatgttttcgtagaatctgcaagtggatatttggctagctttgaggatttcgttggaaacgggattacatataaaaaggagacagcagcattctcagaaacttctttgtgatgtctgcattcaagtcacagagttgagcattccctttcatagagcaggttggaaacactctttttgtagtatctggatgaggacatttggagcgctttcaggcgtatggtgaaaaaggaaatatcttcccgtaaaaactagacagaagcattctcagaaatttatttgtgatgtgtgccctcaactaacagagttgaacctttcttttgatagagcagttttgaaacactctttttgtaaaatctgcaagaggatatttggatagctttgaggatttcgttgcaaacgggaatggcttcatataaactctagacagaagcattctcagaaacttcgttgggatgtttcgattgaagtcccagtgttgaacattcccttttatagagcaggttggaaacactctttctgcattccctggaagtggacatttggagcgctttcaggacgacggtgaaaatggaaatatcttccaagaaaatctagatagaagcaatgtcagaaacttttatgtgatggatctactcagctaacagagttgaacctttcttttgagagagcagttttgcaacactctttttgtggaatatgcaagtggatattagggcagctttgaggatttcgttggaaacgggaatacatgtaaaaagcagacagcagcattctcagaaacttctttgtgatgtttgcattgaagtcacagagttgaacattccctttgagagagcaggtttgaaacacgccttttgtcatatctggaagtgtccattcggagcgcattcaggcttgtgttgaaaaaggaaatatcctcccataaaaactagacagaagcattctcagaaacttatctgtgatgtatgtactcaactaacagaactaaaccatcgttttgaaggagcagttttgaaacactctttttgcggaatctgcaagtggatatttggctagctgggaggatttcgttggaaacgggattacatacaaaaagcagacagcagcattctcagaaacttctttgtgatgtttgcattcaagtcacagagttgaacattccctttcatagagcaggtttgaaacactctttttgtagtatctggatgtggacatttggatcgctttcaggcctatggtgaaaaaggaaatatcttcccatgaaaactagacagaagcattctcagaaacttatttgtgatgtgtgccctcaactgacagtgttgaacctttgttttgatagagcagttctgaaacacactttttgtaaaatctgcaagaggatatttggatagctctgaggatttcgttggaaacgggagtgtcttcatgtaaactctagacagaagcattctcagaaactgctttgggatgtttcaattgaagtcccagtgttgaacattcccattcatagagcaggtttgaaacactctttttgtactatctggaagtggacatttggagcgctttcaggtctacggtgaaaaaggagatatcttccaataaaaactagatagaagcaatgtcagaactttttccatgatgtatctactcagcaaacacagttgaacctttcttttgagagagcagttttgaaacactctttttgtggaatatgcaagtgggtattaggccagcttggaggatttcgttggaaacgggaatacgtataaaaagcagacagcagcattgtcagaaactactttgtgatgtttgcattcaagtcacagaattgaacactccctttcacagagcaggtttgaaacactctttttgtagtgtctgtaagtgaacatttggattgctttcaggcctaaggtgaaaaaggaaatatcttcccataaaaactagacagaagcattctcagaaacttgtttgtgatgtgtgccctctactgacagagttgaacctttctttgcaaagagcagttttgaaacactctttttgtagaatctgcaagaggatatttggatagctttgaggatttcttgggaaacgggaatgtcttcagataaactctagacagaagcattctcagaaacttctttgggatgtttcaattgaagtcccagtgttgaacattccctttcacagagcaggtttgaaacactctttttgtagtgtctataagtgaacatttggcgtgctttcaggcctaacgtgaaaaaggaaatatcttcccataaaaactagacagaagcattctcagaaacttgtttgtgatgtgtgccctctactgacagagttgaacctttccttgcaaagagcagctttgacacacactttttgtagaatctgcaagaggctatttggatagctttgaggatttcgttggaaacgggtatgtcttcagataaactctagacagaagcattctcagaaacttctttgagatgttgcattcaagtcacagagtagaacattcccattcatagagcagatttgaaacactctttttgtagtatctgaaagtggacatttggagcgctttcaggcctatgatgaaaaaggaaatatcttcccataaaaactagacggaagcattctcagaaacttatttgtgatgtgtttgctcaactaacaggattgaaccatcgttttgaaggagcagttttgaaacactgttttcgtggaatctgcaagtggatatttggctagctttgaggatttcgttggaaacgggattacatataaaaaggagacagcagcattctcagaaacttctttgtgatgtctgcattcaattcacagagttgggcattccctttcatagagcaggttggaaacactctttttgtagtatctggatgaggacatttggagcgctttcaggcgtatggtgaaaaaggaaatatcttcccgtaaaaactagacagaagcattctcagaaatttatttgtgatgtgtgccctcaactaacagagttgaacctttcttttgatagagcagttttgaaacactctttttgtaaaatctgcaagaggatatttggatagctttgaggatttcgttgcaaacgggaatggcttcatataaactctagacagaagcattctcagaaacttcgttgggatgttttgattgaagtcccagtgttgaacattcccttttatagagcaggttggaaacactctttctgcattccctggaagtggacatttggagcgctttcaggacgacggtgaaaatggaaatatcttccaataaaatctagatagaagcaacgtcagaaacttttctgtgatggatctactcagctaacagagttgaacctttcttttgagagagcagttttgcaacactctttttgtggaatatgcaagtggatattagggcagctttgaggatttcgttggaaacgggaatacatgtaaaaagcagacagcagcattctcagaaacttctttgtgatgtttgcattcaagtcacagagttgaacattccctttgagagagcaggtttgaaacacgccttttgtcatatctggaagtgtccattcggagcgcattcaggcttgtgttgaaaaaggaaatatcctcccagaaatactagacagaagcattctcagaaacttatctgtgatgtatgtactcaactaacagaactaaaccatcgttttgaaggagcagttttgaaacactctttttgcggaatctgcaagtggatatttggctagctgggaggatttcgttggaaacgggattacatacaaaaagcagacagcagcattctcagaaacttctttgtgatgtttgcattcaagtcaaagagttgaacattccctttcatagagcaggtttgaaacactctttttgtagtatctggatgtggacatttggatcgctttcaggcctatggtgaaaaaggaaatatcttcccatgaaaactagacagaagcattctcagaagtttatttgtgatgtgtgccctcaactaacagagttgaatctttcttttgatagagcagttttgaaacactctttttgtaaaatctgcaagaggatatttggatagctttgaggatttcgttgcaaacgggaatggcttcatataaactctaggcagaagcattctcagaaacttcgttgggatgtttcgattgaagtcccagtgttgaacattcccttttatagagcaggttggaaacactctttctgcattccctggaagtggacatttggagcgctttcaggacgacggtgaaaatggaaatatcttccaagaaaatctagatagaagcaacgtcagaaacttttctgtgatggatctactcagctaacagagttgaacctttcttttgagagagcagttttgcaacactctttttgtggaatatgcaagtggatattagggcagctttgaggatttcgttggaaacgggaatacatgtaaaaagcagacagcagcattctcagaaacttctttgtgatgtttgcattgaagtcacagagttgaacattccctttgagagagcaggtttgaaacacgccttttgtcatatctggaagtgtccattcggagcgcattcaggcttgtgttgaaaaaggaaatatcctcccataaaaactagacagaagcattctcagaaacttatctgtgatgtatgtactcaactaacagaactaaaccatccttttgaaggagcagttttgaaacactctttttgcggaatctgcaagtggatatttggctagctgggaggatttcgttggaaacgggattacatacaaaaagcagacagcagcattctcagaaacttatttgtgatgtgtgccctcaactgacagtgttgaacctttgttttgatagagcagttctgaaacacactttttgtaaaatctgcaagaggatatttggatagctttgaggatttcgttggaaacgggaatgtcttcatgtaaactctagacagaagcattctcagaaactgctttgggatgtttcaattgaagtcccagtgttgaacattcccattcatagagcaggtttgaaacactctttttgtactatctggaagtggacatttggagcgctttcaggtctacggtgaaaaaggagatatcttccaataaaaactagatagaagcaatgtcagaacttttttcatgatgtatctactcagcaaacagagttgaacctttcttttgagagagcagtttcgaaacactctttctgtggaatatgcaagtgggtattaggccagcttggaggatttcgttggaaacgggaatacgtataaaaagcagacagcagcattgtcagaaactactttgtgatgtttgcattcaagtcacagaattgaacactccctttcacagagcaggtttgaaacactctttttgtagtgtctgtaagtgaacatttggattgctttcaggcctaaggtgaaaaaggaaatatcttcccataaaaactagacagaagcattctcagaaacttgtttgtgatgtgtgccctctactgacagagttaaacctttctttgcaaagagcagttttgaaacactctttttgtagaatctgcaagaggatatttggatagctttgaggatttcctgggaaacgggaatgtcttcagataaactctagacagaagcattctcagaaacttctttgggatgtttcaattgaagtcacagtgttgaacattccctttcacagagcaggtttgaaacactctttttgtagtgtctataagtgaacatttggcgtgctttcaggcctaacgtgaaaaaggaaatatcttcccataaaaactagacagaagcattctcagaaacttgttcttgatgtgtcccctctactgacagagttgaaactttctttgcaaagagcagctttgaaacactctttttgtagaatctgcaagaggatatttggatagcttggaggatttcgttggaaacgggtatgtcttcagataaactctagacagaagcattctcagaaacttctttgggatgttgcattcaagtcacagagtagaacattcccattcatagagcagatttgaaacactctttttgtagtatctggaagtggacatttggagcgctttcaggcctatgttgaaaaaggaaatatcttcccataaaaactagacggaagcattctcagaaacttatttgtgatgtgtttgctcaactaacaggattgaaccatcgttttgaaggagcagttttgaaacactgttttcgtggaatctgcaagtggatatttggctagctttgaggatttcgttggaaacgggattacatataaaaaggagacagccagcattctcagaaacttctttgtgatgtttgcattcaattcacagagttgagcattccctttcatagagcaggttggaaacactctttttgtagtatctggatgtggacatttggatcgctttcaggcctatggtgaaaaaggaaatatcttcccatgaaaactagacagagcattctcagaaatttatttgtgatgtgtgccctcaactaacagagttgaacctttcttttgatagagcagttttgaaacactctttttgtaaaatctgcaagaggatatttggatagctttgaggatttcgttgcaaacgggaatggcttcatataaactctagacagaagcattctcagaaacttcgttgggatgtttcgattgaagtcccagtgttgaacattcccttttatagagcaggttggaaacactctttctgcattccctggaagtggacatttggagcgctttctggacgacggtgaaaatggaaatatcttccaagaaaatctagatagaagcaacgtcagaaacttttctgtgatggatctactcagctaacagagttgaacctttcttttgagagagcagttttgcaacactctttttgtggaatatgcaagtggatattagggcagctttgaggatttcgttggaaacgggaatacatgtaaaaagcagacagcagcattctcagaaacttctttgtgatgtttgcattgaagtcacagagttgaacattccctttgagagagcaggtttgaaacacgccttttgtcatatctggaagtgtccattcggagcgcattcaggcttgtgttgaaaaaggaaatatcctcccataaaaactagacagaagcattctcagaaacttatctgtgatgtatgtactcaactaacagaactaaaccatcgttttgaaggagcagttttgaaacactctttttgcggaatctgcaagtggatatttggctagctgggaggatttcgttggaaacgggattacatacaaaaagcagacagcagcattctcagaaacttctttgtgatgtttgcattgaagtcacagagttgaacattccctttgagagagcaggtttgaaacacgccttttgtcatatctggaagtgtccattcggagcgcattcaggcttgtgttgaaaaaggaaatatcctcccataaaaactagacagaagcattctcagaaacttatctgtgatgtatgtactcaactaacagaactaaaccatcgttttgaaggagcagttttgaaacactctttttgcggaatctgcaagtggatatttggctagctgggaggatttcgttggaaacgggattacatacaaaaagcagacagcagcattctcagaaacttctttgtgatgttggcattcaagtcacagagttgaacattccctttcatagagcaggtttgaaacactctttttgtagtatctggatgtggacatttggatcgctttcaggcctatggtgaaaaaggaaatatcttcccatgaaaactagacagaagcattctcagaaacttatttgtgatgtgtgccctcaactgacagtgttgaacctttgttttgatagagcagttctgaaacacactttttgtaaaatctgcaagaggatatttggatagctttgaggatttcgttggaaacgggaatgtcttcatgtaaactctacacagaagcattctcagaaactgctttgggatgtttcaattgaagtcccagtgttgaacattcccattcatagagcaggtttgaaacactctttttgtactatctggaagtggacatttggagcgctttcaggtctacggtgaaaaaggagatatcttccaataaaaactagatagaagcaatgtcagaacttttttcatgatgtatctactcagcaaacagagttgaagctttcttttgagagagcagttttgaaacactctttttgtggaatatgcaagtgggtattaggccagcttggaggatttcgttggaaacgggaatacgtataaaaagcagacagcagcattgtcagaaactactttgtgatgtttgcattcaagtcacagaattgaacactccctttcacagagcaggtttgaaacactctttttgtagtgtctgtaagtgaacatttggattgctttcaggcctaaggtgaaaaaggaaatatcttcccataaaaactagacagaagcattctcagaaacttgtttgtgatgtgtgccctctactgacagagttgaacctttctttgcaaagagcagttttgaaacactctttttgtagaatctgcaagaggatatttggatagctttgaggatttcttgggaaacgggaatgtcttcagataaactctagacagaagcattctcagaaacttctttgggatgtttcaattgaagtcacagtgttgaacattccctttcacagagcaggtttgaaacactctttttgtagtgtctataagtgaacatttggcgtgctttcaggcctaacgtgaaaaaggaaatatcttcccataaaaactagacagaagcattctcagaaacttgttcgtgatgtgtgccctctactgacagagttgaacctttctttgcaaagagcagctttgaaacactctttttgtagaatctgcaagaggatatttggatagctttgaggatttcgttggaaacgggtatgtcttcagataaactctagacagaagcattctcagaaacttctttgggatgttgcattcaagtcacagagtagaacattcccattcatagagcagatttgaaacactctttttgtagtatctggaagtggacatttggagcgctttcaggcctatgttgaaaaaggaaatatcttcccataaaaactagacggaagcattctcagaaacttacttgtgatgtgtttgctcaactaacagaattgaaccatcgttttgaaggagcagttttgaaacactgttttcgtggaatctgcaagtggatatttggctagctttgaggatttcgttggaaacgggattacatataaaaaggagacagcagcattctcagaaacttctttgtgatgtctgcattcaagtcacagagttgagcattccctttcatagagaaggttggaaacactctttttgtagtatctggatgaggacatttggagcgctttcaggcgtatggtgaaaaaggaaatatcttcccgtaaaaactagacagaagcattctcagaaatttatttgtgatgtgtgccctcaactaacagagttgaacctttcttttgatagagcagttttgaaacactctttttgtaaaatctgcaagaggatatttggatagctttgaggatttcattgcaaacgggaatggcttcatataaactctagacagaagcattctcagaaacttcgttgggatgtttcgattgaagtcccagtgttgaacattcccttttatagagcaggttggaaacactctttctgcattccctggaagtggacatttggagcgctttcaggacgacggtgaaaatggaaatatcttccaagaaaatctagatagaagcaacgtcagaaacttttctgtgatggatctactcagctaacagagttgaacctttcttttgagagagcagttttgcaacactctttttgtggaatatgcaagtggatattagggcagctttgaggatttcgttggaaacgggaatacatgtaaaaagcagacagcagcattctcagaaacttctttgtgatgtttgcattgaagtcacagagttgaacattccctttgagagagcaggtttgaaacacgccttttgtcatatctggaagtgtccattcggagcgcattcaggcttgtgttgaaaaaggaaatatcctcccagaaaaactagacagaagcattctcagaaacttatctgtgatgtatgtactcaactaacagaactaaaccatcgttttgaaggagcagttttgaaacactctttttgcggaatctgcaagtggatatttggctagctgggaggatttcgttggaaacgggattacatacaaaaagcagacagcagcattctcagaaacttctttgtgatgtttgcattcaagtcacagagttgaacattccctttcatagagcaggtttgaaacactctttttgtagtatctggatgtggacatttggatcgctttcaggcctatggtgaaaaaggaaatatcttcccatgaaaactagacagaagcattctcagaaacttatttgtgatgtgtgccctcaactgacagtgttgaacctttgttttgatagagcagttctgaaacacactttttgtaaaatctgcaagaggatattgggatagctttgaggatttcgttggaaacgggaatgtcttcatgtaaactctagacagaagcattctcagaaactgctttgggatgtttcaattgaagtcccagtgttgaacattcccattcatagagcaggtttgaaacactctttttgtactatctggaagtggacatttggagcgctttcaggtctacggtgaaaaaggagatatcttccaataaaaactagatagaagcaatgtcagaacttttttcatgatgtatctactcagctaacagagctgaacctttcttttgagagagcagttttgaaacactctttttgtggaatatgcaagtgggtattaggccagcttggaggatttcgttggaaacgggaatacgtataaaaagcagacagcagcattgtcagaaactactttgtgatgtttgcattcaagtcacagaattgaacactccctttcacagagcaggtttgaaacactctttttgtagtgtctgtaagtgaacatttggattgctttcaggcctaaggtgaaaaaggaaatatcttcccataaaaactagacagaagcattctcagaaacttgtttgtgatgtgtgccctctactgacagagttgaacctttctttgcaaagagcagctttgaaacactctttttgtagaatctgcaagaggatatttggatagctttgaggatttcttgggaaacgggaatgtcttcagataaactctagacagaagcattctcagaaacttctttgggatgtttcaattgaagtcacagtgttgaacattccctttcacagagcaggtttgaaacactctttttgtagtgtctataagtgaacatttggcgtgctttcaggcgtaacgtgaaaaaggaaatatcttcccataaaaaccagacagaagcattctcagaaacttgttcgtgatgtgtgccctctactgacagagttgaacctttctttgcaaagagcagctttgaaacacactttttgtagaatctgcaagaggatatttggaaagctttgaggatttcgttggaaacgggtatgtcttcagataaactctagacagaagcattctcagaaacttctttgggatgttgcattcaagtcacagagtagaacattcccattcatagagcagatttgaaacactctttttgtagtatctggaagtggacatttggagcgctttcaggcctatgttgaaaaaggaaatatcttcccataaaaactagacggaagcattctcagaaacttatttgtgatgtgtttgctcaactaacaggattgaaccatcgttttgaaggagcagttttgaaacactgttttcgtggaatctgcaagtggatatttggctagctttgaggatttcgttggaaacgggattacatataaaaaggagacagcatcattctcagaaacttctttgtgatgtctgcattcaattcacagagttgagcattccttttcatagagcaggttggaaacactctttttgtagtatctggatgaggacatttggagcgctttcaggcgtatggtgaaaagggaaatatcttcccgtaaaaactagacagaagcattctcagaagtttatttgtgatgtgtgccctcaactaacagagttgaacctttcttttgatagagcagttttgaaacactctttttgtaaaatctgcaagaggatatttggatagctttgaggatttcgttgcaaacgggaatggcttcatataaactctagacagaagcattctcagaaacttcattgggatgtttcgattgaagtcccagtgttgaacattcccttttatagagcaggttggaaacactctttctgcattccctggaagtggacatttggagcgctttcaggacgacggtgaaaatggaaatatcttccaataaaatctacatagaagcaacgtcagaaacttttatgtgatggatctactcagctaacagagttgaacctttcttttgagagagcagttttgcaacactctttttgtggaatatgcaagtggatattagggcagctttgaggatttcgttggaaacgggaatacatgtaaaaagcagacagcagcattctcagaaacttctttgtgatgtttgcattgaagtcacagagttgaacattccctttgagagagcaggtttgaaacacgccttttgtcatatctggaagtgtccattcggagcgcattcaggcttgtgttgaaaaaggaaatatcctcccagaaaaactagacagaagcattctcagaaacttatttgtgatgtatgtactcaactaacagaactgaaccatcgttttgaaggagcagttttgaaacactctttttgcggaatctgcaagtggatatttggctagcttggaggatttcgttggaaacgggattacatacaaaaagcagagagcagcattctcagaaacttatttgtgatgtgtgccctcaactgacagtgttgaacctttgttttgatagagcagttctgaaacacactttttgtaaaatctgcaagaggatatttggatagctttgaggatttcgttggaaacgggaatgtcttcatgtaaactctagacagaagcattctcagaaactgctttgggatgtttcaattgaagtcccagtgttgaacattcccattcatagagcaggtttgaaacactctttttctactatctggaagtggacatttggagcgctttcaggtctacggtgaaaaaggagatatcttccaataaaaactagatagaagcaatgtcagaacttttttcatgatgtatctactcagcaaacagagttgaacctttgttttgagagagcagttttgacactgtctttgtggaatatgcaagtgggtattaggccagcttggaggatttcgttggaaacgggaatacgtataaaaagcagaaagcagcattgtcagaaactgctttgtgatgtttgcattcaagtcacagaattgaacactccctttcacagagcaggtttgaaacactctttttgtagtgtctgtaagtgaacatttggattgctttcaggcctatggtgaaaaaggaaatatcttcccataaaaactagacagaagcattctcagaaacttgtttgtgatgtgtgccctctactgacagagttgaacctttctttgcaaagagcagttttgaaacactctttttgtagaatctgcaagaggatatttggatagctttgaggatttcttgggaaacgggaatgtcttcagataaactctagacagaagcattctcagaaacttctttgggatgtttcaattgaagtcacagtgttgaacattccctttcacagagcaggtttgaaacactctttttgtagtgtctataagtgaacatttggcgtgctttcaggcctaacgtgaaaaaggaaatatcttcccataaaaactagacagaagcattctcagaaacttgttcgtgatgtgtgccctctactgacagagttgaacctttctttgcaaagagcagctttgaaacactctttttgtagaatctgcaagaggatatttggatagctttgaggatttcgttggaaacgggtatgtcttcagataaacttctagacagaagcattctcagaaacttctttgggatgttgcattcaagtcacagagtagaacattcccattcatagagcagatttgaaacactctttttgtagtatctggaagtggacatttggagcgctttcaggcctatgttgaaaaaggaaatatcttcccataaaaactagacggaagcattctcagaaacttatttgtgatgtgtttgctcaactaacaggattgaaccatcgttttgaaggagcagttttgaaacactgttttcgtggaatctgcaagtggatatttggctagctttggggatttcgttggaaacgggattacatataaaaaggagacagcagcattctcagaaacttctttgtgatgtctgcattcaattcacagagttgagcattccctttcatagagcaggttggaaacactctttttgtagtatctggatgaggacatttggagcgctttcaggcgtatggtgaaaaaggaaatatcttcccgtaaaaactagacagaagcattctcagaagtttatttgtgatgtgtgccctcaactaacagagttgaacctttcttttgatagagcagttttgaaacactctttttgtaaaatctgcaagaggatatttggatagctttgaggatttcgttgcaaacgggaatggcttcatataaactctagacagaagcattctcagaaacttcgttgggatgtttcgattgaagtcccagtgttgaacattcccttttatagagcaggttggaaacactctttctgcattccctggaagtggacatttggagcgctttcaggacgacggtgaaaatggaaatatcttccaagaaaatctagatagaagcaatgtcagaaacttttatgtgatggatctactcagctaacagagttgaacctttcttttgagagagcagttttgcaacactctttttgtggaatatgcaagtggatattagggcagctttgaggatttcgttggaaacgggtatacatgtaaaaagcagacagcagcattctcagaaacttctttgtgatgtttgcattgaagtcacagagttgaacattccctttgagagagcaggtttgaaacacgccttttgtcatatctggaagtgtccattcggagcgcattcaggcttgtgatgaaaaaggaaatatcctcccataaaaactagacagaagcattctgagaaacttatttgtgatgtgtgtactcaactaacagaattgaatcatcgttttgaaagagcagttttgaaacactccttttgtggaatctgcaagtggatatttgtctagctttgaggatttcgttggaaacgggattacatataaaaagcagacagcagcattttcagaaactactttgtgatgtttgcattcaagtcacagagttgaacattccctttcatagagcaggtttgaaacactctttttgtagtatctggatgtggacatttggatcgctttcaggcctatggtgaaaaaggaaatatcttcccatgaaaactagacagaagcattctcagaaatttatttgtgatgtgtgccctcaactaacagagttgaacctttcttttgatagagcagttttgaaacactctttttgtaaaatctgcaagaggatatttggatagctttgaggatttcgttgcaaacgggaatggcttcatataaactctagacagaagcattctcagaaactccgttgggatgtttcgattgaagtcccagtgttgaacattcccttttatagagcaggttggaaacactctttctgcattccctggaagtggacatttggagcgctttcaggacgacggtgaaaatggaaatatcttccaagaaaatctagatagaagcaacgtcagaaacttttctgtgatggatctactcagctaacagagttgaacctttcttttgagagagcagttttgcaacactctttttgtggaatatgcaagtggatattagggcagctttgaggatttcgttggaaacgggaatacatgtaaaaagcagacagcagcattctcagaaacttctttgtgatgtttgcattgaagtcacagagttgaacattccctttgagagagcaggtttgaaacacgccttttgtcatatctggaagtgtccattcggagcgcattcaggcttgtgttgaaaaaggaaatatcctcccataaaaactagacagaagcattctcagaaacttatctgtgatgtatgtactcaactaacagaactaaaccatcgttttgaaggagcagttttgaaacactctttttgcggaatctgcaagtggatatttggctagctgggaggatttcgttggaaacgggattacatacaaaaagcagacagcagcattctcagaaacttctttgtgatgtttgcattcaagtcacagagttgaacattccctttcatagagcaggtttgaaacactctttttgtagtatctggatgtggacatttggatcgctttcaggcctatggtgaaaaaggaaatatcttcccatgaaaactagacagaagcattctcagaaacttatttgtgatgtgtgccctcaactgacagtgttgaacctttgttttgatagagcagttctgaaacacactttttgtaaaatctgcaagaggatatttggatagctttgaggatttcgttggaaacgggaatgtcttcatgtaaactctagacagaagcattctcagaaactgctttgggatgtttcaattgaagtcccagtgttgaacattccctttcatagagcaggtttgaaaccctctttttgtactatctggaagtggacatttggagcgctttcaggtctacggtgaaaaaggagatatcttccaataaaaactagatagaagcaatgtcagaacttttttcatgatgtatctactcagcaaacagagttgaacctttcttttgagagagcagttttgaaacactccttttgtggaatatgcaagtgggtattaggccagcttggaggatttcgttggaaacgggaatacgtataaaaagcggacagcagcattgtcagaaactactttgtgatatttgcattcaagtcacagaattgaacactccctttcacagagcaggtttgaaacactctttttgtagtgtctgtaagtgaacatttggattgctttcaggcctaaggtgaaaaaggaaatatcttcccataaaaactagacagaagcattctcagaaacttgtttgtgatgtgtgccctctactgacagagttgaacctttctttgcaaagagcagttttgaaacactctttttgtagaatctgcaagaggatatttggatagctttgaggatttcttgggaaacgggaatgtcttcagataaactctagacagaagcattctcagaaacttctttgggatgtttcaattgaagtcacagtgttgaacattccctttcacagagcaggtttcaaacactctttttgtagtgtctataagtgaacatttggcgtgctttcaggcctaacgtgaaaaaggaaatatcttcccataaaaactagacagaagcattctcagaaacttgtttgtgatgtgtgccctctactgacagagttgaacctttctttgcaaagagcagctttgaaacactctttttgtagaatctgccagaggatatttggatagctttgaggatttcgttggaaacgggtatgtcttcagataaactctagacagaagcattctcagaaacttctttgggatgttgcattcaagtcacagagtagaacattcccattcatagagcagatttgaaacactctttttgtagtatctggaagtggacatttggagcgctttcaggcctatgttgaaaaaggaaatatcttcccataaaaactagacggaagcattctcagaaacttatttgtgatgtgtttgctcaactaacaggattgaaccatcgttttgaaggagcagttttgaaacactgttttcgtggaatctgcaagtggatatttggctagctttgaggatttcgttggaaacgggattacatatacaaaggagacagcagcattctcagaaacttctttgtgatgtctgcattcaattcacagagttgagcattccctttcatagagcaggttggaaacactctttttgtagtatctggatgaggacatttggagcgctttcaggcgtatggtgaaaaaggaaatatcttcccgtaaaaactagacagaagcattctcagaagtttatttgtgatgtgtgccctcaactaacagagttgaacctttcttttgatagagcagttttgaaacactctttttgtaaaatctgcaagaggatatttggatagctttgaggatttcgttgcaaacgggaatggcttcatataaactctagacagaagcattctcagaaacttcgttgggatgtttcgattgaagtcccagtgttgaacattcccttttatagagcaggttggaaacactctttctgcattccctggaagtggacatttggagcgctttcaggacgacggtgaaaatggaaatatcttccaagaaaatctagatagaagcaatgtcataaacttttctgtgatggatctactcagctaacagagttgaacctttcttttgagagagcagttttgcaacactctttttgtggaatatgcaagtggatattagggcagctttgaggatttcgttggaaacgggaatacatgtaaaaagcagacagcagcattctcagaaacttctttgtgatgtttgcattgaagtcacagagttgaacattccctttgagagagcaggtttgaaacacgccttttgtcatatctggaagtgtccattcggagcgcattcaggcttgtgttgaaaaaggaaatatcctcccataaaaactagacagaagcattctcagaaacttatttgtgatgtatgtactcaactaacagaactaaaccatcgttttgaaggagcagttttgaaacactctttttgcggaatctgcaactggatatttggctagcttggaggatttcgttggaaacgggattacatacaaaaagcagacagcagcattctcagaaacttctttgtgatgtttgcattcaagtcgcagagttgaacattccctttcatagagcaggtttgaaacactctttttgtagtatctggatgtggacctttggatcgctttcaggcctatggtgaaaaaggaaatatcttcccatgaaaactagacagaagcattctcagaaacttatttgtgatgtgtgccctcaactgacagtgttgaacctttgttttgatagagcagttctgaaacacactttttgtaaaatctgcaagaggatatttggatagctttgaggatttcgttggaaacgggaatgtcttcatgtaaactctagacagaagcattctcagaaactgctttgggatgtttcaattgaagtcccagtgttgaacattcccattcatagagcaggtttgaaacactctttttgtactatctggaagtggacatttggagcgctttcaggtctacggtgaaaaaggagatatcttccaataaaaactagatagaagcaatgtcagaacttttttcatgatgtatctactcagcaaacagagttgaacctttcttttgagagagcagttttgacacagtctttgtggaatatgcaagtgggtattaggccagcttggaggatttcgttggaaacgggaatacgtataaaaagcagacagcagcattgtcagaaactactttgtgatgtttgcattcaagtcacagaattgaacactccctttcacagagcaggtttgaaacactctttttgtagtgtctgtaagtgaacatttggattgctttcaggcctatggtgaaaaaggtaatatcttcccataaaaactagacagaagcattctcagaaacttgtttgtgatgtgtgccctctactgacagagttgaacctttctttgcaaagagcagttttgaaacactctttttgtagaatctgcaagaggatatttggatagctttgaggatttcttgggaaacgggaatgtcttcagataaactctagacagaagcattctcagaaacttctttgggatgtttcaattgaagtcacagtgttgaacattccctttcacagagcaggtttgaaacactctttttgtagtgtctataagtgaacatttggcgtgctttcaggcgtaacgtgaaaaaggaaatatcttcccataaaaactagacagaagcattctcagaaacttgtttgtgatgtgtgccctctactgacagagttgaacctttctttgcaaagagcagctttgaaacacactttttgtagaatctgcaagaggatatttggatagctttgaggatttcgttggaaacgggtatgtcttcagataaactctagacagaagcattctcagaaacttctttgggatgttgcatgcaagtcacagagtagaacattcccattcatagagcagatttgaaacactctttttgtagtatctggaagtggacatttggagcgctttcaggcctatgttgaaaaaggaaatatcttcccataaaaactagacggaagcattctcagaaacttatttgtgatgtgtttgctcaactaacaggattgaaccatcgttttgaaggagcagttttgaaacactgttttcgtggaatctgcaagtggatatttggctagctttgaggatttcgttggaaacgggattacatataaaaaggagacagcagcattctcagaaacttctttgtgatgtctgcattcaattcacagagttgagcattccctttcatagagcaggttggaaacactctttttgtagtatctggatgaggacatttggagcgctttcaggcgtatggtgaaaaaggaaatatcttcccgtaaaaactagacagaagcattctcagaagtttatttgagatgtgtgccctcaactaacagagttgaacctttcttttgatagagcagttttgaaacactctttttgtaaaatctgcaagaggatatttggatagctttgaggatttcgttgcaaacgggaatggcttcatataaactctagacagaagcattctcagaaacttcgttgggatgttttgattgaagtcccagtgttgaacattcccttttatagagcaggttggaaacactctttctgcattccctggaagtggacatttggagcgctttcaggacgacggtgaaaatggaaatatcttccaataaaatctagatagaagcaatgtcagaaacttttatgtgatggatctactcagctaacagagttgaacctttcttttgagagagcagttttgcaacactctttttgtggaatatgcaagtggatattagggcagctttgaggatttcgttggaaacgggaatacatgtaaaaagcagacagcagcattctcagaaacttctttgtgatgtttgcattgaagtcacagagttgaacattccctttgagagagcaggtttgaaacacgccttttgtcatatctggaagtgtccattcggagcgcattcaggcttgtgttgaaaaaggaaatatcctcccataaaaactagacagataagcattctcagaaacttatctgtgatgtatgtactcaactaacagaactaaaccatcgttttgaaggagcagttttgaaacactctttttgcggaatctgcaagtggatatttggctagctgggaggatttcgttggaaacgggattacatacaaaaagcagacagcagcattctcagaaacttctttgtgatgtttgcattcaagtcacagagttgaacattccctttcatagagcaggtttgaaacactctttttgtagtatctggatgtggacatttggatcgctttcaggcctatggtgaaaaaggaaatatcttcccatgaaaactagacagaagcattctcagaaacttatttgtgatgtgtgccctcaactgacagtgttgaacctttgttttgatagagcagttctgaaacacactttttgtaaaatctgcaagaggatatttggatagctttgaggatttcgttggaaacgggaatgtcttcatgtaaactctagacagaagcattctcagaaactgctttgggatgtttcaattgaagtcccagtgttgaacattccctttcatagagcaggtttgaaacactctttttgtactatctggaagtggacatttggagcgctttcaggtctacggtgaaaaaggagatatcttccaataaaaactagatagaagcaatgtcagaacttttttcatgatgtatctactcagcaaacagagttgaacctttcttttgagagagcagttttgaaacactctttttgtggaatatgcaagtgggtattaggccagcttggaggatttcgttggaaacgggaatacgtataaaaagcagacagcagcattgtcagaaactactttgtgatgtttacattcaagtcacagaattgaacactccctttcacagagcaggtttgaaacactctttttgtagtgtctgtaagtgaacatttggattgctttcaggcctaaggtgaaaaaggaaatgtcttcccataaaaactagacagaagcattctcagaaacttgtttgtgatgtgtgccctctactgacagagttgaacctttctttgcaaagaccagttttgaaacactctttttgtagaatctgcaagaggatatttggatagctttgaggatttcttgggaaacgggaatgtcttcagataaactctagacagaagcattctcagaaacttctttgggatgtttcaattgaagtcacagtgttgaacattccctttcacagagcaggtttgaaacactctttttgtagtgtctataattgaacatttggcgtgctttcaggcctaacgtgaaaaaggaaatatcttcccataaaaactagacagaagcattctcagaaacttgttcgtgatgtgtgccctctactgacagagttgaacctttctttgcaaagagcagctttgaaacactctttttgtagaatctgcaagaggatatttggatagctttgaggatttcgttggaaacgggtatgtcttcagataaactctagacagaagcattctcagaaacttctttgggatgttgcattcaagtcacagagtagaacattcccattcatagagcagatttgaaacactctttttgtagtatctggaagtggacatttggagcgctttcaggcctatgttgaaaaaggaaatatcttcccataaaaactagacggaagcattctcagaaacttacttgtgatgtgtttgctcaactaacagaattgaaccatcgttttaaaggagcagttttgaaacactgttttcgtggaatctgcaagtggatatttggctagctttgaggatttcgttggaaacgggattacatataaaaaggagacagcagcattctcagaaacttctttgtgatgtctgcattcaattcacagagttgagcattccctttcatagagcaggttggaaacactctttgtgtagtatctggatgaggacatttggagcgctttcaggcctatggtgaaaaaggaaatatcttcccgtaaaaactagacagaagcattctcagaaatttatttgtgatgtgtgccctcaactaacagagttgaacctttcttttgatagagcagttttgaaacactctttttgtaaaatctgcaagaggatatttggatagctttgaggatttcattgcaaacgggaatggcttcatataaactctagacagaaacattctcagaaacttctttgggatgtttcgattgaagtcccagtgttgaactttcccttttatagagcaggttggaaacactctttctgcattccctggaagtggacatttggagcgctttcaggacgacggtgaaaatggaaatatcttccaagaaaatctagatagaagcaacgtcagaaacttttatgtgatggatctactcagctaacagagttgaacctttcttttgagagagcagttttgcaacactctttttgtggaatatgcaagtggatattagggcagctttgaggatttcgttggaaacgggaatacatgtaaaaagcagacagcagcattctcagaaacttctttgtgatgtttgcattgaagtcacagagttgaacattccctttgagagagcaggtttgaaacacgccttttgtcatatctggaagtgtccattcggagcgcattcaggcttgtgttgaaaaaggaaatatcctcccataaaaactagacagaagcattctcagaaacttatctgtgatgtatgtactcaactaacagaactaaaccatcgttttgaaggagcagttttgaaacactctttttgcggaatctgcaagaggatatttggctagctgggaggatttcgttggaaacgggattacatacaaaaagcagacagcagcattctcagaaacttctttgtgatgtttgcattcaagtcacagagttgaacattccctttcatagagcaggtttgaaacactctttttgtagtatctggatgtggacatttggatcgctttcaggcctatggtgaaaaaggaaatatcttcccatgaaaactagacagaagcattctcagaaacttatttgtgatgtgtgccctcaactgacagtgctgaacctttgttttgatagagcagttctgaaacacactttttgtaaaatctgcaagaggatatttggatagctttgaggatttcgttggaaacgggaatgtcttcatgtaaactctagacagaagcattctcagaaactgctttgggatgtttcaattgaagtcccagtgttgaacattcccattcatagagcaggtttgaaacactctttttgtactatctggaagtggacatttggagcgctttcaggtctacggtgaaaaaggagatatcttccaataaaaactagatagaagcaatgtcagaacttttttcatgatgtatctactcagcaaacagagttgaacctttcttttgagagagcagttttgaaacactctttttgtggaatatgcaagtgggtattaggccagcttggaggatttcgttggaaacgggaatacgtataaaaagcagacagcagcattgtcagaaactactttgtgatgtttgcattcaagtcacagaattgaacactccctttcacagagcaggtttgaaacactctttttgtagtgtctgtaagtgaacatatggattgctttcaggcctaaggtgaaaaaggaaatatcttcccataaaaactagacagaaagcattctcagaaacttgtttgtgatgtgtgccctctactgacagagttgaacctttctttgcaaagagcagttttgaaacactctttttgtagaatctgcaagaggatatttggatagctttgaagatttcttgggaaacgggaatgtcttcagataaactctagacaggaagcattctcagaaacttctttgggatgtttcaattgaagtcacagtgttgaacattccctttcacagagcaggtttgaaacactctttttgtagtgtctataattgaacatttggcgtgctttcaggcctaacgtgaaaaaggaaatatcttcccataaaaactagacagaagcattctcagaaacttgttcgtgatgtgtgccctctactgacagagttgaacctttctttgcaaagagcagctttgaaacactctttttgtagaatctgcaagaggatatttggatagctttgaggatttcgttggaaacgggtatgtcttcagataaactctagacagaagcattctcagaaacttctttgggatgttgcattcaagtcacagagtagaacattcccattcatagagcagatttgaaacactctttttgtagtatctggaagtggacatttggagcgctttcaggcctatgttgaaaaaggaaatatcttcccatgaaaactagacagaagcattctcagaaacttatttgtgatgtgtgccctcaactgacagtgttgaacctttgttttgatagagcagttctgaaacacactttttgtaaaatctgcaagaggatatttggatagctttgaggatttcgttggaaacgggaatgtcttcatgtaaactctagacagaagcattctcagaaactgctttggaatgtttcaattgaagtcccagtgttgaacattccctttcatagagcaggtttgaaacactctttttgtactatctggaagtggacatttggagcgctttcaggtctacggtgaaaaaggagatatcttccaataacaactagatagaagcaatgtcagaacttttttcatgatgtatctactcagcaaacagagttgaacctttcttttgagagagcagttttgaaacactctttttgtggaatatgcaagtgggtattaggccagcttggaggatttcgttggaaacgggaatacgtataaaaagcagacagcagcattgtcagaaactactttgtgatgtttgcattcaagtcacagaattgaacactccctttcacagagcaggattgaaacactctttttgtagtgtctgtaagtgaacatttggattgctttcaggcctaaggtgaaaaaggaaatatcttcccataaaaactagacagaagcattctcagaaacttgtttgtgatgtgtgccctctactgacagagttgaacctttctttgcaaagagcagttttgaaacactctttttgtagaatctgcaagaggatatttggatagctttgaggatttcttgggaaacgggaatgtcttcagataaactctagacagaagcattctcagaaacttcttgggatatttcaattgaagtcacagtgttgaacattccctttcacagagcaggtttgaaacactctttttgtagtgtctataagtgaacatttggcgtgctttcaggcctaacgtgaaaaaggaaatatcttcccataaaaactagacagaagcattctcagaaacttgttcgtgatgtgtgccctctactgacagagttgaacctttctttgcaaagagcagctttgaaacactctttttgtagaatctgcaagaggatatttggatagctttgaggatttcgttggaaacgggtatgtcttcagataaactctagacaggaagcattctcagaaatttctttgggatgttgcatgcaagtcacagagtagaacattcccattcatagagcagatttgaaacactctttttgtagtatctggaagtggacatttggagcgctttcaggcctatgttgaaaaaggaaatatcttcccataaaaactagacggaagcattctcagaaacttatttgtgatgtgtttgctcaactaacaggattgaaccatcgttttgaaggagcagttttgaaacactgttttcgtggaatctgcaagtggatatttggctagctttgaggatttcgttggaaacgggattacatataaaaaggagacagcagcattctcagaaacttctttgtgatgtctgcattcaattcacagagttgagcattccctttcatagagcaggttggaaacactctttttgtagtatctggatgaggacatttggagcgctttcaggcgtatggtgaaaaaggaaatatcttcccgtaaaaactagacagaagcattctcagaagtttatttctgatgtgtgccctcaactaacagagttgaacctttcttttgatagagcagttttgaaacactctttttgtaaaatctgcaagaggatatttggatagctttgaggatttcgttgcaaacgggaatggcttcatataaactctagacagaagcattctcagaaacttcgttgggatgtttcgattgaagtcccagtgttgaacattcccttttatagagcaggttggaaacactctttctgcattccctggaagtggacatttggagcgctttcaggacgacggtgaaaatggaaatatcttccaagaaaatctagatagaagcaatgtcagaaacttttctgtgatggatctactcagctaacagagttgaacctttcttttgagagagcagttttgcaacactctttttgtggaatacgcaagtggatattagggcagctttgaggatttcgttggaaacgggaatacatgtaaaaagcagacagcagcattctcagaaacttctttgtgatgtttgcattgaagtcacagagttgaacattccctttgagagagcaggtttgaaacacgccttttgtcatatctggaagtgtccattcggagcgcattcaggcttgtgttgaaaaaggaaatatcctcccataaaaactagacagaagcattctcagaaacttatctgtgatgtatgtactcaactaacagaactaaaccatcgttttgaaggagcagttttgaaacactctttttgcggaatctgcaagtggatatttggctagctgggaggatttcgttggaaacgggattacatacaaaaagcagagagcagcattctcagaaacttatttgtgatgtgtgccctcaactgacagtgttgaacctttgttttgatagagcagttctgaaacacactttttgtaaaatctgcaagaggatatttggatagctttgaggatttcgttggaaacgggaatgtcttcatgtaaactctagacagaagcattctcagaaactgctttgggatgtttcaattgaagtcccagtgttgaacattccctttcatagagcaggtttgaaacactctttttgtactatctggaagtggacatttggagcgctttcaggtctacggtgaaaaaggagatatcttccaataaaaactagatagaagcaatgtcagaacttttttcatgatgtatctactcagcaaacagagttgaacctttcttttgagagagcagtttcgaaacactctttctgtggaatatgcaagtgggtattaggccagcttggaggatttcgttggaaacgggaatacgtataaaaagcagacagcagcattgtcagaaactactttgtgatgtttgcattcaagtcacagaattgaacactccctttcacagagcaggtttgaaacactctttttgtagtgtctgtaagtgtacatttggattgctttcaggcctaaggtgaaaaaggaaatatcttcccataaaaactagacagaagcattctcagaaacttgtttgtgatgtgtgccctctactgacagagttgaacctttctttgcaaagagcagttttgaaacactctttttgtagaatctgcaagaggatatttggatagctttgaggatttcttgggaaacgggaatgtcttcagataaactctagacagaagcattctcagaaacttctttgggatatttcaattgaagtcacagtgttgaacattccctttcacagagcaggtttgaaacactctttttgtagtgtgtataagtgaacatttcgcgtgctttcaggcctaacgtgaaaaaggaaatatcttcccataaaaactagacagaagcattctcagaaacttgttcatgatgtgtgccctctactgacagagttgaacctttctttgcaaagagcagctttgaaacactctttttgtagaatctgcaagaggatatttggatagcttggaggatttcgttggaaacgggtatgtcttcagataaactctagacagaagcattctcagaaacttctttgggatgttgcattcaagtcacagagtagaacattcccattcatagagcagatttgaaacactctttttgtagtatctggaagtggacatttggagcgctttcaggcctatgttgaaaaaggaaatgtcttcccataaaaactagacggaagcattctcagaaacttacttgtgatgtgtttgctcaactaacagaattgaaccatcgttttgaaggagcagttttgaaacactgttttcgtggaatctgcaagtggatatttggctagctttgaggatttcgttggaaacgggattacatataaaaaggagacagcagcattctcagaaacttctttgtgatgtctgcattcaagtcacagagttgagcattccctttcatagagcaggttggaaacactctttttgtagtatctggatgaggacatttggagcgctttcaggcctatggtgaaaaaggaaatatcttcccgtaaaaactagacagaagcattctcagaaatttatttgtgatgtgtgccctcaactaacagagttgaacctttcttttgatagagcagttttgaaacactctttttgtaaaatctgcaagaggatatttggatagctttgaggatttcgttgcaaacgggaatggcttcatataaactctagacagaagcattgtgagaaacttcgttgggatgtttcgattgaagtcccagtgttgaacattcccttttatagagcaggttggaaacactctttctgcattccctggaagtggacatttggagcgctttcaggacgacggtgaaaatggaaatatcttccaataaaatctagatagaagcaatgtcagaaacttttatgtgatggatctactcagctaacagagttgaacctttcttttgagagagcagttttgcaacactctttttgtggaatatgcaagtggatattagggcagctttgaggatttcgttggaaacgggaatacatgtaaaaagcagacagcagcattctcagaaacttctttgtgatgtttgcattgaagtcacagagttgaacattccctttgagagagcaggtttgaaacacgccttttgtcatatctggaagtgtccattcggagcgcattcaggcttgtgttgaaaaaggaaatatcctcccataaaaactagacagaagcattctcagaaacttatctgtgatgtatgtactcaactaacagaactaaaccatcgttttgaaggagcagttttgaaacactctttttgcggaatctgaaagtggatatttggctagctgggaggatttcgttggaaacgggattacatacaaaaagcagacagcagcattctcagaaacttctttgtgatgtttgcattcaagtcacagagttgaacattccctttcatagagcaggtttgaaacactctttttgtagtatctggatgtggacatttggatcgctttcaggcctatggtgaaaaaggaaatatcttcccatgaaaactagacagaagcattctcagaaacttatttgtgatgtgtgccctcaactgacagtgttgaacctttgttttgatagagcagttctgaaacacactttttgtaaaatctgcaagaggatatttggatagctttgaggatttcgttggaaacgggaatgtcttcatgtaaactctagacagaagcattctcagaaactgctttgggatgtttcaattgaagtcccagtgttgaacattccctttcatagagcaggtttgaaacactctttttgtactatctggaagtggacatttggagcgctttcaggtctacggtgaaaaaggagatatcttccaataaaaactagatagaagcaatgtcagaacttttttcatgatgtatctactcagcaaacagagttgaacctttcttttgagggagcagttttgaaacactatttttgtggaatatgcaagtgggtattaggccagcttggaggatttcgttggaaacgggaatacgtataaaaagcagacagcagcattgtcagaaactactttgtgatgtttgcattcaagtcacagaattgaacactccctttcacagagcaggtttgaaacactctttttgtagtgtctgtaagtgaacatttggattgatttcaggcctaaggtgaaaaaggaaatatcttcccataaaaactagacagaagcattctcagaaacttgtttgtgatgtgtgccctctactgacagagttgaacctttctttgcaaagagcagttttgaaacactctttttgtagaatctgcaagaggatatttggatagctttgaggatttcttgggaaacgggaatgtcttcagataaactctagacagaagcattctcagaaacttctttgggatgtttcaattgaagtcacagtgttgaacattccctttcacaggagcaggtttgaaacactctttttgtagtgtctataagtgaacatttggcgtgctttcaggcctaacgtgaaaaaggaaatatcttcccataaaaactagacagaagcattctcagaaacttgttcgtgatgtgtgccctctactgacagagttgaacctttctttgcaaagagcagctttgaaacactctttttgtagaatctgcaagaggatatttggatagctttgaggatttcgttggaaacgggtatgtcttcagataaactctagacagaaacattctcagaaacttctttgggatgttgcattcaagtcacagagtagaacattcccatgcatagagcagatttgaaacactctttttgtagtatctggaagtggacatttggagcgctttcaggcctatgttgaaaaaggaaatatcttcccataaaaactagacggaagcattctcagaaacttacgtgtgatgtgtttgctcaactaacagaattgaaccatcgttttgaaggagcagttttgaaacactgttttcgtggaatctgcaagtggatatttggctagctttgaggatttcgttggaaacgggattacaaataaaaaggagtcagcagcattctcagaaacttctttgtgatgtctgcattcaagtcacagagttgagcattccctttcatagagcaggttggaaacactctttttgtagtatctggatgaggacatttggagcgctttcaggcctatggtgaaaaaggaaatatcttcccgtaaaaactagacagaagcattctcagaaatttatttgtgatgtgtgccctcaactaacagagttgaacctttcttttgatagagcagttttgaaacactctttttgtaaaatctgcaagaggatatttggatagctttgaggatttcgttgcaaacgggaatggcttcatataaactctagacagaagcattctcagaaacttcgttgggatgtttcgattgaagtcccagtgttgaacattcccttttatagagcaggttggaaacactctttctgcattccctggaagtggacatttggagcgctttcaggacgacggtgaaaatggaaatatcttccaagaaaatctagatagaagcaacgtcagaaacttttatgtgatggatctactcagctaacagagttgaacctttcttttgagagagcagttttgcaacactctttttgtggaatatgcaagtggatattagggcagctttgaggatttcgttggaaacgggaatacatgtaaaaagcagacagcagcattctcagaaacttctttgtgatgtttgcattgaagtcacagagttgaacattccctttgagagagcaggtttgaaacacgccttttgtcatatctggaagtgtccattcggagcgcattcaggcttgtgttgaaaaaggaaatatcctcccataaaaactagacagaagcattcacagaaacttatgtgtgatgtatgtactcaactaacagaactaaaccatcgttttgaaggagcagtgttgaaacactctttttgcggaatctgcaagtggatatttgcctagcttggaggatttcgttggaaacgggattacatataaaaagcagacagcagcattcccagaaacttatttgtgatgtgtgccctcaactgacagtgttgaacctttgttttgatagagcagttctgaaacacactttttgtaaaatctgcatgaggatattgggatagcttggaggatttcgttggaaacgggaatgtcttcatgtaaactctagacagaagcattctcagaaactgctttgtgatgcttcaattgaagtcccagtgttgaacattccctttcatacagcaggtttgaaacactctttttgtagtatctggaagtggacatttggagcgctttcaggtctacggtgaaaaaggagatatcttccaataaaaactagatagaagcaatgtcagaacttttcccatgatgtatctactcagcaaacagagttgaacctttcttttgagagagcagttttgaaacactctttttgtggaatatgcaactgggtattaggtcagcttggaggatttcgttggaaacgggaatacgtataaaaagcagacagcagcattgtcagaaactactttgtgatgtttgcattcaagtcacagaattgaacactccctttcacagagcaggtttgaaacactctttttgtagtgtctgtaagtgaacatttggattgctttcaggcctaaggtgaaaaaggaaatatcttcccataaaaactagacagaagcattctcagaaacttgtttgtgatgtgtgccctctactgacagagttgaacctttctttgcaaagagcagttttgaaacactctttttgtagaatctgcaagaggatatttggatagctttgaggatttcttgggaaacgggaatgtcttcagataaactctagacagaagcattctcagaaacttctttgggatgtttcaattgaagtcacagtgttgaacattccctttcacagagcaggtttgaaacactctttttgtagtgtctataagtgaacatttggcgtgctttcaggcgtaacgtgaaaaaggaaatatcttcccataaaaactagacagaagcattctcagaaacttgttcgtgatgtgtgccctctactgacagagttgaacctttctttgcaaagagcagctttgaaacacactttttgtagaatctgcaagaggatatttggatagcttggaggatttcgttggaaacgggtatgtcttcagataaactctagacagaagcattctcagaaacttctttgggatgttgcattcaagtcacagagtagaacattcccattcatagagcagatttgaaacactctttttgtagtatctggaagtggacatttggagcgctttcaggcctatgttgaaaaaggaaatatcttcccataaaaactagacggaagcattctcagaaacttatttgtgatgtgtgcactcaactgacagtgttgaacctttgctttgatagagcagttctgaaacacactttttgtaaaatctgcaagaggatatttggctagctttgaggatttcgttggaaacgggattacatataaaaaggagacagcagcattctcagaaacttctttgtgatgtctgcattcaattcacagagttgagcattccctttcatagagcaggttggaaacactctttttgtagtatctggatgaggacatttggagcgctttcaggcctatggtgaaaaaggaaatatcttcccgtaaaaactagacagaagcattctcagaagtttatttgtgatgtgtgccctcaactaacagagttgaacctttcttttgatagagcagttttgaaacactctttttgtaaaatctgcaagaggatatttggatagctttgaggatttcgttgcaaacgggaatggcttcatataaactctagacagaagcattctcagaaacttcgttgggatgtttcgattgaagtcccagtgttgaacattcccttttatagagcaggttggaaacactctttctgcattccctggaagtggacatttggagcgctttcaggacgacggtgaaaatggaaatatcttccaagaaaatctagatagaagcaatgtcagaaacttttatgtgatggatctactcagctaacagagttgaacctttcttttgagagagcagttttgcaacactctttttgtggaatatgcaagtggatattagggcagctttgaggatttcgttggaaacgggaatacatgtaaaaagcagacagcagcattctcagaaacttctttgtgatgtttgcattgaagtcacagagttgaacattccctttgagagagcaggtttgaaacacgccttttgtcatatctggaagtgtccattcggagcgcattcaggcttgtgttgaaaaaggaaatatcctcccataaaaactagacagaagcattctcagaaacttatctgtgatgtatgtactcaactaacagaactaaaccatcgttttgaaggagcagttttgaaacactctttttgcggaatctgcaagtggatatttggctagctgggaggatttcgttggaaacgggattacatacaaaaagcagacagcagcattctcagaaacttctttgtgatgtttgcattcaagtcacagagttgaacattccctttcatagagcaggtttgaaacactctttttgtagtatctggatgtggacatttggatcgctttcaggcctatggtgaaaaaggaaatatcttcccatgaaaactagacagaagcattctcagaaacttatttgtgatgtgtgccctcaactgacagtgttgaacctttgttttgatagagcagttctgaaacacaccttttgtaaaatctgcaagaggatatttggatagctttgaggatttcgttggaaacgggaatgtcttcatgtaaactctacacagaagcattctcagaaactgctttgggatgtttcaattgaagtcccagtgttgaacattccctttcatagagcaggtttgaaacactctttttggagtatctggaagtggacatttggagcgctttcacggtctacggtgaaaaaggagatatcttccaataaaaactagatagaagcaatgtcagaacttttttcatgatgtatctactcagcaaacagagttgaaccttacttttgagagagcagttttgaaacactctttttgtggaatatgcaagtgggtattaggccagcttggaggatttcgttggaaacgggaatacgtataaaaagcagacagcagcattgtcagaaactactttgtgatgtttgcattcaagtcacagaattgaacactccctttcacagagcaggttagaaacactctttttgtagtgtctgtaagtgaacatttggattcctttcaggcctaaggtgaaaaaggaaatatcttcccataaaaactagacagaagcattctcagaaacttgtttgtgatgtgtgccctctactgacagagttgaacctttctttgcaaagagcagttttgaaacactctttttgtagaatctgcaagaggatatttggatagctttgaggatttcttgggaaacgggaatgtcttcagataaactctagacagaagcattctcagaaacttctttgggatgtttcaattgaagtcacagtgttgaacattccctttcacagagcaggtttgaaacactctttttgtagtgtctataagtgaacatttggcgtgctttcaggccaacgtgaaaaaggaaatatcttcccataaaaactagacagaagcattctcagaaacttgttcgtgatgtgtgccctctactgacagagttgaacctttctttgcaaagagcagctttgaaacactctttttgtagaatctgcaagaggatatttggatagctttgaggatttcgttggaaacgggtatgtcttcagataaactctagacagaagcattctcagaaacttctttgggatgttgcattcaagtcacagagtagaacattcccattcatagagcagatttgaaacactctttttgtagtatctggaagtggacatttggagcgctttcaggcctatgttgaaaaaggaaatatcttcccataaaaacaagacggaagcattctcagaaacttacttgtgatgtgtttgctcaactaacagaattgaaccatcgttttaaaggagcagttttgaaacactgttttcgtggaatctgcaagtggatatttggctagctttgaggatttcgttggaaacgggattacatataaaaaggagacagcagcattctcagaaacttctttgtgatgtctgcattcaagtcacagagttgagcattccctttcatagagcaggttggaaacactctttttgtagtatctggatgaggacatttggagcgctttcaggcctatggtgaaaaaggaaatatcttcccgtaaaaactagacagaagcattctcagaaatttatttgtgatgtgtgccctcaactaacagagttgaacctttcttttgatagagcagttttgaaacactctttttgtaaaatctgcaagaggatatttggatagctttgaggatttcgttgcaaacgggaatggcttcatataaactctagacagaagcattctcagaaacttcgttgggatgtttcgattgaagtcccagtgttgaacattcccttttatagagcagattggaaacactctttttgcattccctggaagtggacatttggagcgctttcaggacgacggtgaaaatggaaatatcttccaagaaaatctagatagaagcaatgtcagaaacttttatgtgatggatctactcagctaacagagttgaacctttcttttgagagagcagttttgcaacactctttttgtggaatatgcaagtggatattagggcagctttgaggatttcgttggaaacgggaatacatgtaaaaagcagacagcagcattctcagaaacttctttgtgatgtttgcattcaagtcacagagttgaacattccctttgagagagcaggtttgaaacacgccttttgtcatatctggaagtgtccattcggagcgcattcaggcttgtgttgaaaaaggaaatatcctcccataaaaactagacagaagcattctcagaaacttatctgtgatgtatgtactcaactaacagaactaaaccatcgttttgaaggagcagttttgaaacactctttttgcggaatctgcaagtggatatttggctagctgggaggatttcgttggaaacgggattacatacaaaaagcagacagcagcattctcagaaacttctttgtgatgtttgcattcaagtcacagagttgaacattccctttcatagagcaggtttgaaacactctttttgtagtatctggatgtggacatttggatcgctttcaggcctatggtgaaaaaggaaatatcttcccatgaaaactagacagaagcattctcagaaacttatttgtgatgtgtgccctcaactgacagtgttgaacctttgttttgatagagcagttctgaaacacactttttgtaaaatctgcaagaggatatttggatagctttgaggatttcgttggaaacgggaatgtcttcatgtaaactctacacagaagcattctcagaaactgctttgggatgtttcaattgaagtcccagtgttgaacattcccattcatagagcaggtttgaaacactctttttgtactatctggaagtggacatttggagcgctttcaggtctacggtgaaaaaggagatatcttccaataaaaactagatagaagcaatgtcagaacttttttcatgatgtatctactcagcacacagagttgaacctttcttttgagagagcagttttgaaacactctttttgtggaatatgcaagtgggtattaggccagcttggaggatttcgttggaaacgggaatacgtataaaaagcagacagcagcattgtcagaaactactttgtgatgtttgcattcaagtcacagaattgaacactccctttcacagagcaggtttgaaacactctttttgtagtgtctgtaagtgaacatttggattgctttcaggcctaaggtgaaaaaggaaatatcttcccataaaaactagacagaagcattctcagaaacttgtttgtgatgtgtgccctctactgacagagttgaacctttctttgcaaagagcaggtttgaaacactctttttgtagaatctgcaagaggatatttggatagctttgaggatttcttgggaaacgggaatgtcttcagataaactctagacagaagcattctcagaaacttctttgggatgtttcaattgaagtcacagtgttgaacattccctttcacagagcaggtttgaaacactctttttgtagtgtctataagtgaacatttggcgtgctttcaggcctaacgtgaaaaaggaaatatcttcccataaaaactagacagaagcattctcagaaacttgttcttgatgtgtcccctctactgacagagttgaacctttctttgcaaagagcagctttgaaacactctttttgtagaatctgcaagaggatatttggatagcttggaggatttcgttggaaacgggtatgtcttcagataaactctagacagaagcattctcagaaacttctttgggatgttgcattcaagtcacagagtagaacattcccattcatagagcagatttgaaacactctttttgtagtatctggaagtggacatttggagcgctttcaggcctatgttgaaaaaggaaatatcttcccatgaaaactagacagaagcattctcagaaacttacttgtgatgtgtttgctcaactaacagaattgaaccatcgttttgaaggagcagttttgaaacactgttttcgtggaatctgcaagtggatatttggctagctttgaggatttcgttggaaacgggattacatatacaaaggagacagcagcattctcagaaacttctttgtgatgtctgcattcaattcacagagttgagcattccctttcatagagcaggttggaaacactctttttgtagtatctggatgtggacatttggatcgctttcaggcctatggtgaaaaaggaaatatcttcccatgaaaactagacagaagcattctcagaaacttatttgtgatgtgtgccctcaactgacagtgttgaacctttgttttgatagagcagttctgaaacacactttttgtaaaatctgcaagaggatatttggatagctttgaggatttcgttggaaacgggaatgtcttcatgtaaactctggacagaagcattctcagaaactgctttgggatgtttcaattgaagtcccagtgttgaacattcccattcatagagcaggtttgaaacactctttttgtactatctggaagtggacatttggagcgctttcaggtctacggtgaaaaaggagatatcttccaataaaaactagatagaagcaatgtcagaacttttttcatgatgtatctactcagcaaacagagttgaacctttcttttgagagagcagttttgaaacactctttttgtggaatatgcaagtgggtattaggccagcttggaggatttcgttggaaacgggaatacgtataaaaagcagacagcagcattgtcagaaactactttgtgatgtttgcattcaagtcacagaattgaacactccctttcacagagcaggtttcaaacactgtttttgtagtgtctgtaagtgaacatatggattgctttcaggcctaaggtgaaaaaggaaatatcttcccataaaaactagacagaagcattctcagaaacttgtttgtgatgtgtgccctctactgacagagttgaacctttctttgcaaagaccagttttgaaacactctttttgtagaatctgcaagaggatatttggatagctttgaggatttcttgggaaacgggaatgtcttcagataaactctagacagaagcattctcagaaacttctttgggatatttcaattgaagtcacagtgttgaacattccctttcacagagcaggtttgaaacactctttttgtagtgtctataagtgaacatttggcgtgctttcaggcgtaacgtgaaaaaggaaatatcttcccataaaaactagacagaagcattctcaggaaacttgttcgtgatgtgtgccctctactgacagagttgaacctttctttgcaaagagcagctttgaaacacactttttgtagaatctgcaagaggatatttggatagcttggaggatttcgttggaaacgggtatgtcttcagataaactctagacagaagcattctcagaaacttctttgggatgttgcattcaagtcacagagtagaacattcccattcatagagcagatttgaaacactctttttgtagtatctggaagtggacatttggagcgctttcaggcctatgttgaaaaaggaaatatgttcccataaaaactagacggaagcattctcagaaacttacttgtgatgtgtttgctcaactaacagaattgaaccatcgtttggaaggagcagttttgaaacactgttttcgtggaatctgcaagtggatatttggctagctttgaggatttcgttggaaacgggattacatataaaaaggagacagcagcattctcagaaacttctttgtgatgtctgcattcaagtcacagagttgagcattccctttcatagagaaggttggaaacactctttttgtagtatctggatgaggacatttggagcgctttcaggcgtatggtgaaaaaggaaatatcttcccgtaaaaactagacagaagcattctcagaagtttatttgtgatgtgtgccctcaactaacagagttgaacctttcttttgatagagcagttttgaaacactctttttgtaaaatctgcaagaggatatttggatagctttgaggatttcgttgcaaacgggaatggcttcatataaactctagacagaagcattctcagaaacttcgttgggatgtttcgattgaagtcccagtgttgaacattcccttttatagagcaggttggaaacactctttctgcattccctggaagtggacatttggagcgctttcaggacgacggtgaaaatggaaatatcttccaataaaatctagatagaagcaatgtcagaaacttttctgtgatggatctactcagctaacagagttgaacctttcttttgagagagcagttttgcaacactctttttgtggaatatgcaagtggatattagggcagctttgaggatttcgttggaaacgggaatacatgtaaaaagcagacagcagcattctcagaaacttctttgtgatgtttgcattgaagtcacagagttgaacattccctttgagagagcaggtttgaaacacgccttttgtcatatctggaagtgtccattcggagcgcattcaggcttgtgttgaaaaaggaaatatcctcccataaaaactagacagaagcattctcagaaacttatctgtgatgtatgtactcaactaacagaactaaaccatcgttttgaaggagcaggtttgaaacactctttttgcggaatctgcaagtggatatttggctagctgggaggatttcgttggaaacgggattacatacaaaaagcagacagcagcattctcagaaacttctttgtgatgtttgcattcaagtcacagagttgaacattccctttcatagagcaggtttgaaacactctttttgtagtatctggatgtggacatttggatcgctttcaggcctatggtgaaaaaggaaatatcttcccatgaaaactagacagaagcattctcagaaacttatttgtgatgtgtgccctcaactgacagtgttgaacctttgttttgatagagcagttctgaaacacactttttgtaaaatctgcaagaggatatttggatagctttgaggatttcgttggaaacgggaatgtcttcatgtaaactctacacagaagcattctcagaaactgctttgggatgtttcaattgaagtcccagtgttgaacattcccattcatagagcaggtttgaaacactctttttgtactatctggaagtggacatttggagcgctttcaggtctacggtgaaaaaggagatatcttccaataaaaactagatagaagcaatgtcagaacttttttcatgatgtatctactcagcacacagagttgaacctttcttttgagagagcagttttgaaacactctttttgtggaatatgcaagtgggtattaggccagcttggaggatttcgttggaaacgggaatacgtataaaaagcagacagcagcattgtcagaaactactttgtgatgtttgcattcaagtcacagaattgaacactccctttcacagagcaggtttgaaacactctttttgtagtgtctgtaagtgaacatttggattgctttcaggcctaaggtgaaaaaggaaatatcttcccataaaaactagacagaagcattctcagaaatttgtttgtgatgtgtgccctctactgacagagttgaacctttctttgcaaagagcagttttgaaacactctttttgtagaatctgcaagaggatatttggatagctttgaggatttcttgggaaacgggaatgtcttcagataaactctagacagaagcattctcagaaacttctttgggatgtttcaattgaagtcacagtgttgaacattccctttcacagagcaggtttgaaacactctttttgtagtgtctataagtgaacatttggcgtgctttcaggcgtaacgtgaaaaaggaaatatcttcccataaaaaccagacagaagcattctcagaaacttgttcgtgatgtgtgccctctactgacagagttgaacctttctttgcaaagagcagctttgaaacactctttttgtagaatctgccagaggatatttggatagctttgaggatttcgttggaaacgggtatgtcttcagataaactctagacagaagcattctcagaaacttctttgggatgttgcattcaagtcacagagtagaacattcccattcatagagcagatttgaaacactctttttgtagtatctggaagtggacatttggagcgctttcaggcctatgttgaaaaaggaaatatcttcccataaaaactagacggaagcattctcagaaacttacttgtgatgtgtttgctcaactaacagaattgaaccatcgttttgaaggagcagttttgaaacactgttttcgtggaatctgcaagtggatatttggctagctttgaggatttcgttggaaacgggattacatataaaaaggagacagcagcattctcagaaacttctttgtgatgtctgcattcaagtcacagagttgagcattccctttcatagagcaggttggaaacactctttgtgtagtatctggatgaggacatttggagcgctttcaggcgtatggtgaaaaaggaaatatattcccgtaaaaactagacagaagcattctcagaaatttatttgtgatgtgtgccctcaactaacagagttgaacctttcttttgatagagcagttttgaaacactctttttgtaaaatctgcaagaggatatttggatagctttgaggatttcattgcaaacgggaatggcttcatataaactctagacagaagcattctcagaaacttcgttgggatgtttcgattgaagtcccagtgttgaacattcccttttatagagcaggttggaaacactctttctgcattccctggaagtggacatttggagcgctttcaggacgacggtgaaaatggaaatatcttccaagaaaatctagatagaagcaatgtcagaaacttttatgtgatggatctactcagctaacagagttgaacctttcttttgagagagcagttttgcaacactctttttgtggaatatgcaagtggatattagggcagctttgaggatttcgttggaaacgggaatatatgtaaaaagcagacagcagcattctcagaaacttctttgtgatgtttgcattgaagtcacagcagttgaacattccctttgagagagcaggtttgaaacacgccttttgtcatatctggaagtgtccattcggagcgcattcaggcttgtgttgaaaaaggaaatatcctcccagaaaaactagacagaagcattctcagaaacttatttgtgatgtatgtactcaactaacagaactaaaccatcgttttgaaggagcagttttgaaacactctttttgcggaatctgcaagtggatatttggctagctgggaggatttcgttggaaacgggattacatacaaaaagcagacagcagcattctcagaaacttctttgtgatgtttgcattcaagtcacagagttgaacattccctttcatagagcaggtttgaaatactctttttgtagtatctggatgtggacatttggatcgctttcaggcctatggtgaaaaaggaaatatatcttcccatgaaaactagacagaagcattctcagaaacttatttgtgatgtgtgccctcaactgacagtgttgaacctttgttttgatagagcagttctgaaacacactttttgtaaaatctgcaagaggatatttggatagctttgaggatttcgttggaaacgggaatgtcttcatgtaaactctagacagaagcattctcagaaactgctttgggatgtttcaattgaagtcccagtgttgaatattccctttcatagagcaggtttgaaacactctttttgtactatctggaagtggacatttggagcgctttcaggtctacggtgaaaaaggagatatcttccaataaaaactagatagaagcaatgtcagaacttttttcatgatgtatctactcagcaaacagagttgaacctttcttttgagagagcagttttgaaacactctttttgtggaatatgcaagtgggtattaggccagcttggaggatttcgttggaaacgggaatacgtataaaaagcagacagcagcattgtcagaaactactttgtgatgtttgcattcaagtcacagaattgaacactccctttcacagagcaggtttgaaacactctttttgtagtgtctgtaagtgaacatttggattgctttcaggcctaaggtgaaaaaggaaatatcttcccataaaaactagacagaagcattctcagaaacttgtttgtgatgtgtgccctctactgacagagttgaacctttctttgcaaagagcagttttgaaacactctttttgtagaatctgcaagaggatatttggatagctttgaggatttcttgggaaacgggaatgtcttcagataaactctagacagaagcattctcagaaacttctttgggatgtttcaattgaagtcacagtgttgaacattccctttcacagagcaggtttgaaacactctttttgtagtgtctataagtgaacatttggcgtgctttcaggcctaacgtgaaaaaggaaatatcttcccataaaaactagacagaagcattctcagaaacttgttcttgatgtgtcccctctactgacagagttgaacctttctttgcaaagagcagctttgaaacactctttttgtagaatctgcaagaggatatttggatagcttggaggatttcgttggaaacgggtatgtcttcagataaactctagacagaagcattctcagaaacttctttgggatgttgcattcaagtcacagagtagaacattcccattcatagagcagatttgaaacactctttttgtagtatctggaagtggacatttggagcgctttcaggcctatgttgaaaaaggaaatatcttcccataaaaactagacggaagcattctcagaaacttatttgtgatgtgtttgctcaactaacaggattgaaccatcgttttgaaggagcagttttgaaacactgttttcgtggaatctgcaagtggatatttggctagctttgaggatttcgttggaaatgggattacatatacaaaggagacagcagcattctcagaaacttctttgtgatgtctgcattcaattcacagagttgagcattccctttcatagagcaggttggaaacactctttttgtagtatctggatgaggacatttggagcgctttctggcctatggtgaaaaaggaaatatcttcctgtaaaaactagacagaagcattctcagaagtttatttgtgatgtgtgccctcaactaacagagttgaacctttcttttgatagagcagttttgaaacactctttttgtaaaatctgcaagaggatatttggatagctttgaggatttcgttgcaaacgggaatggcttcatataaactctagacagaagcattctcagaaacttcgttgggatgtttcgattgaagtcccagtgttgaacattcccttttatagagcaggttggaaacactctttctgcattccctggaagtggacatttggagcgctttcaggacgacggtgaaaatggaaatatcttccaagaaaatctagatagaagcaacgtcagaaacttttatgtgatggatctactcagctaacagagttgaagctttcttttgagagagcagttttgcaacactctttttgtggaatatgcaagtggatattagggcagctttgaggatttcgttggaaacgggaatacatgtaaaaagcagacagcagcattctcagaaacttctttgtgatgtttgcattgaagtcacagagttgaacattccctttgagagagcaggtttgaaacacgccttttgtcatatctggaagtgtccattcggagcgcattcaggcttgtgttgaaaaaggaaatatcctcccataaaaactagacagaagcattctcagaaacttatttgtgatgtatgtactcaactaacagaactaaaccatcgttttgaaggagcagttttgaaacactctttttgcggaatctgcaagtggatatttggctagctgggaggatttcgttggaaacgggattacatacaaaaagcagagagcagcattctcagaaacttctttgtgatgtttgcattcaagtcacagagttgaacattccctttcatagagcaggttggaaacactctttttgtagtatctggatgtggacatttggatcgctttcaggcctatggtgaaaaaggaaatatcttcccatgaaaactagacagaagcattctcagaaacttatttgtgatgtgtgccctcaactgacagtgttgaacctttgttttgatagagcagttctgaaacacactttttgtaaaatctgcaagaggatatttggatagctttgaggatttcgttggaaacgggaatgtcttcatgtaaactctggacagaagcattctcagaaactgctttgggatgtttcaattgaagtcccagtgttgaacattcccattcatagagcaggtttgaaacactctttttgtactatctggaagtggacatttggagcgctttcaggtctacggtgaaaaaggagatatcttccaataaaaactagatagaagcaatgtcagaacttttttcatgatgtatctactcagcaaacagagttgaacctttcttttgagagagcagttttgaaacactctttttgtggaatatgcaagtgggtattaggccagcttgaaggatttcgttggaaacgggattacgtataaaaagcagacagcagcattgtcagaaactactttgtgatgtttgcattcaagtcacagaattgaacactccctttcacagagcaggtttgaaacactctttttgtagtgtctgtaagtgaacatttggattgctttcaggcctaaggtgaaaaaggaaatatcttcccataaaaactagacagaagcattctcagaaacttgtttgtgatgtgtgccctctactgacagagttgaacctttctttgcaaagagcagttttgaaacactctttttgtagaatctgcaagaggatatttggatagctttgaggatttcttgggaaacgggaatgtcttcagataaactctagacagaagcattctcagaaacttctttgggatgtttcaattgaagtcacagtgttgaacattccctttcacagagcaggtttgaaacactctttttgtagtgtctataagtgaacatttggcgtgctttcaggcctaacgtgaaaaaggaaatatcttcccataaaaactagacagaagcattctcagaaacttgttcatgatgtgtgccctctactgacagagttgaacctttctttgcaaagagcagctttgaaacactctttttgtagaatctgcaagaggatatttggatagctttgaggatttcgttggaaacgggtatgtcttcagataaactctagacagaagcattctcagaaacttctttgggatgttgcattcaagtcacagagtagaacattcccattcatagagcagatttgaaacactctttttgtagtatctggaagtggacatttggagcgctttcaggcctatgttgaaaaaggaaatatcttcccataaaaactagacggaagcattctcagaaacttatttgtgatgtgtttcctcaactaacaggattgaaccatcgttttgaaggagcagttttgaaacactgttttcgtggaatctgcaagtggatatttggctagctttgaggatttcgttggaaacgggattacatataaaaaggagacagcagcattctcagaaacttctttgtgatgtttgcattcaagtcacagagttgaatattccctttcatagagcaggtttgaaacactctttttgtagtatctggatgtggacatttggatcgctttcaggcctatggtgaaaaaggaaatatcttcccatgaaaactagacagaagcattctcagaaacttattggtgatatgtgccctcaactgacagtgttgaacctttgttttgatagagcagttctgaaacacactttttgtaaaatctgcaagaggatatttggatagctttgaggatttcgttggaaacgggaatgtcttcatgtaaactctagacagaagcattctcagaaactgctttgggatgtttcaattgaagtcccagtgttgaacattcccattcatagagcaggtttgaaacactctttttgtactatctggaagtggacatttggagcgctttcaggtctacggtgaaaaaggagatatcttccaataaaaactagatagaagcaatgtcagaacttttttcatgatgtatctactcagcaaacagagttgaacctttcttttgagagagcagttttgaaacactctttttgtggaatatgcaagtgggtattaggccagcttggaggatttcgttggaaacgggaatacgtataaaaagcagacagcagcattgtcagaaactactttgtgatgtttgcattcaagtcacagaattgaacactccctttcacagagcaggtttgaaacactctttttgtagtgtctgtaagtgaacatttggattgctttcaggcctaaggtgaaaaaggaaatatcttcccataaaaactagacagaagcattctcagaaatttgtttgtgatgtgtgccctctactgacagagttgaacctttctttgcaaagagcagttttgaaacactctttttgtagaatctgcaagaggatatttggatagctttgaggatttcttgggaaacgggaatgtcttcagataaactctagacagaagcattctcagaaacttctttgggatgtttcaattgaagtcacagtgttgaacattccctttcacagagcaggtttgaaacactctttttgtagtgtctataagtgaacatttggcgtgctttcaggcctaacgtgaaaaaggaaatatcttcccataaaaactagacagaagcattctcagaaacttgttcgtgatgtgtgccctctactgacagagttgaacctttctttgcaaagagcagctttgaaacacactttttgtagaatctgcaagaggatatttggatagctttgaggatttcgttggaaacgggtatgtcttcagataaactctagacagaagcattctcagaaacttctttgggatgttgcattcaagtcacagagtagaacattcccattcatagagcagatttgaaacactctttttgtagtatctggaagtggacatttggagtgctttcaggcctatgttgaaaaaggaaatatcttcccataaaaactagacggaagcattctcagaaacttatttgtgatgtgtttgctcaactaacaggattgaaccatcgttttgaaggagcagttttgaaacactgttttcgtggaatctgcaagtggatatttggctagctttgaggatttcgttggaaacgggattacatataaaaaggaaacagcagcattctcagaaacttctttgtgatgtctgcattcaattcacagagttgagcattccctttcatagagcaggttggaaacactctttttgtagtatctggatgaggacatttggagcgctttcaggcgtatggtgaaaaaggaaatatcttcccgtaaaaactagacagaagcattctcagaaatttatttgtgatgtgtgccctcaactaacagagttgaacctttcttttgatagagcagttttgaaacactctttttgtaaaatctgcaagaggatatttggatagctttgaggatttcgttgcaaacgggaatggcttcatataaactctagacagaagcattctcagaaacttcgttgggatgtttcgattgaagtcccagtgttgaacattcccttttatagagcaggttggaaacactctttctgcattccctggaagtggacaattggagcgctttcaggacgacggtgaaaatggaaatatcttccaataaaatctggatagaagcaacgtcagaaacttttctgtgatggatctactcagctaacagagttgaacctttcttttgagagagcagttttgcaacactctttttgtggaatatgcaagtggatattagggcagctttgaggatttcgttggaaacgggaatacatgtaaaaagcagacagcagcattctcagaaacttctttgtgatgtttgcattgaagtcacagagttgaacattccctttgagagagcaggtttgaaacacgccttttgtcatatctggaagtgtccattcggagcgcattcaggcttgtgttgaaaaaggaaatatcctcccataaaaactagacagaagcattctcagaaacttatctgtgatgtatgtactcaactaacagaactaaaccatcgttttgaaggagcagttttgaaacactctttttgcggaatctgcaagtggatatttggctagctgggaggatttcgttggaaacgggattacatacaaaaagcagacagcagcattctcagaaacttctttgtgatgtttgcattcaagtcacagagttgaacattccctttcatagagcaggtttgaaacactctttttgtagtatctggatgtggacatttggatcgctttcaggcctatggtgaaaaaggaaatatcttcccatgaaaactagacagaagcattctcagaaacttatttgtgatgtgtgccctcaactgacagtgttgaacctttgttttgatagagcagttctgaaacacactttttgtaaaatctgcaagaggatatttggatagctttgaggatttcgttggaaacgggaatgtcttcatgtaaactctacacagaagcattctcagaaactgctttgggatgtttcaattgaagtcccagtgttgaacattcccattcatagagcaggtttgaaacactctttttgtactatctggaagtggacatttggagcgctttcaggtctacggtgaaaaaggagatatcttccaataaaaactagatagaagcaatgtcagaacttttttcatgatgtatctactcagctaacagagttgaacctttcttttgagagagcagttttgaaacactctttttgtggaatatgcaagtgggtattaggccagcttggaggatttcgttggaaacgggaatacgtataaaaagcagacagcagcattgtcagaaactactttgtgatgtttgcattcaagtcacagaattgaacactccctttcacagagcaggtttgaaacactctttttgtagtgtctgtaagtgaacatttggattgatttcaggcctaaggtgaaaaaggaaatatcttcccataaaaactagacagaagcattctcagaaacttgtttgtgatgtgtgccctctactgacagagttgaacctttctttgcaaagagcagttttgaaacactctttttgtagaatctgcaagaggatatttggatagctttgaggatttcttgggaaacgggaatgtcttcagataaactctagacagaagcattctcagaaacttctttgggatgtttcaattgaagtcacagtgttgaacattccctttcacagagcaggtttgaaacactctttttgtagtgtctataagtgaacatttggcgtgctttcaggcctaacgtgaaaaaggaaatatcttcccataaaaactagacagaagcattctcagaaacttgttcgtgatgtgtgccctctactgacagagttgaacctttctttgcaaagagcagctttgaaacacactttttgtagaatctgcaagaggatatttggatagcttggaggatttcgttggaaacgggtatgtcttcagataaactctagacagaagcattctcagaaacttctttgggatgttgcattcaagtcacagtgtagaacattcccattcatagagcagatttgaaacactctttttgtagtatctggaagtggacatttggagcgctttcaggcctatgttgaaaaaggaaatatcttcccataaaaactagacggaagcattctcagcaaacttacttgtgatgtgtttgctcaactaacagaattgaaccatcgttttgaaggagcagttttgaaacactgttttcgtggaatctgcaagtggatatttggctagctttgaggatttcgttggaaacgggattacatataaaaaggagacagcagcattctcagaaacttctttgtgatgtttgcattcaagtcacagagttgaacattccctttcatagagcaggtttgaaacactctttttgtagtatctggatgtggacatttggatcgctttcaggcctatggtgaaaaaggaaatatcttcccatgaaaactagacagaagcattctcagaagtttatttgtgatgtgtgccctcaactaacagagttgaacctttcttttgatagagcagttttgaaacactctttttgtaaaatctgcaagaggatatttggatagctttgaggatttcgttgcaaacgggaatggcttcatataaactagacagaagcattctcagaaacttcgttgggatgtttcgattgaagtcccagtgttgaacattcccttttatagagcaggttggaaacactctttctgcattccctggaagtggacatttggagcgctttcaggacgacgatgaaaatggaaatatcttccaagaaaatctagatagaagcaatgtcagaaacttttatgtgatggatctactcagctaacagagttgaacctttcttttgagagagcagttttgcaacactctttttgtggaatatgcaagtggatattagggcagctttgaggatttcgttggaaacgggaatacatgtaaaaagcagacagcagcattctcagaaacttctttgtgatcttttcattgaagtcacagagttgaacattccctttgagagagcaggtttgaaacacgccttttgtcatatctggaagtgtccattcggagcgcattcaggcttgtgttgaagaaggaaatatcctcccataaaaactagacagaagcattctcagaaactcatttgtgatgtatgtactcaactaacagaactaaaccatcgttttgaaggagcagttttgaaacaccctttttgcggaatctgcaactggatatttggctagcttggaggatttcgttggaaacgggattacatacaaaaagcagacagcaagcattctcagaaacttatttgtgatgtgtgccctcaactgacagtgttgaacctttgttttgatagagcagttctgaaacacactttttgtaaaatctgcaagaggatatttggatagctttgaggatttcgttggaaacgggaatgtcttcatgtaaactctacacagaagcattctcagaaactgctttgggatgtttcaattgaagtcccagtgttgaacattcccattcatagagcaggtttgaaacactctttttgtactatctggaagtggacatttggagcgctttcaggtctacggtgaaaaaggagatatcttccaataaaaactagatagaagcaatgtcagaacttttttcatgatgtatctactcagcaaacagagttgaacctttcttttgagagagcagttttgaaacacactttttgtggaatatgcaagtgggtattaggccagcttggaggatttcgttggaaacgggaatacgtataaaaagcagacagcagcattgacagaaactactttgtgatgtttgcattcaagtcacagaattgaacactccctttcacagagcaggtttgaaacactctttttgtagtgtctgtaagtgaacatatggattgctttcaggcctaaggtgaaaaaggaaatatcttcccataaaaactagacagaagcattctcagaaacttgtttgtgatgtgtgccctctactgacagagttgaacctttctttgcaaagaccagttttgaaacactctttttgtagaatctgcaagaggatatttggatagctttgaggatttcttgggaaacgggaatgtcttcagataaactctagacagaagcattctcagaaacttctttgggatatttcaattgaagtcacagtgttgaacattccctttcacagagcaggtttgaaacactctttttgtagtgtctataagtgaacatttggcgtgctttcaggcctaacgtgaaaaaggaaatatcttcccataaaaactagacagaagcattctcagaaacttgttcgtgatgtgtgccctctactgacagagttgaacctttctttgcaaagagcagctttgaaacactctttttgtagaatctgcaagaggatatttggatagcttggaggatttcgttggaaacgggtatgtcttcagataaactctagacagaagcattctcagaaacttctttgggatgttgcattcaagtcacagagtagaacattcccattcatagagcagatttgaaacactctttttgtagtatctggaagtggacatttggagcgctttcaggcctatgttgaaaaaggaaatatcttcccataaaaactagacggaagcattctcagaaacttacttgtgatgtgtttgctcaactaacagaattgaaccatcgtttggaaggagcagttttgaaacactgttttcgtggaatctgcaagtggatatttggctagctttgaggatttcgttggaaacgggattacatataaaaaggagacagcagcattctcagaaacttctttgtgatgtttgcattcaagtcacagagttgaacattccctttcatagagcaggtttgaaacactctttttgtagtatctggatgtggacatttggatcgctttcaggcctatggtgaaaaaggaaatatcttcccatgaaaactagacagaagcattctcagaaacttatttgtgatgtgtgccctcaactgacagtgttgaacctttgttttgatagagcagttctgaaacacactttttgtaaaatctgcaagaggatatttggatagctttgaggatttcgttggaaacgggaatgtcttcatgtaaactctagacagaagcattctcagaaactgctttgggatatttcaattgaagtcccagtgttgaacattccctttcatagagcaggtttgaaacactctttttgtactatctggaagtggacatttggagcgctttcaggtctacggtgaaaaaggagatatcttccaataaaaactagatagaagcaatgtcagaacttttttcatgatgtatctactcagcaaacagagttgaacctttcttttgggagagcagttttgaaacactctttttgtggaatatgcaagtgggtattaggccagcttggaggatttcgttggaaacgggaatacgtataaaaagcagacagcagcattgtcagaaactactttgtgatgtttgcattcaagtcacagaattgaacactccctttcacagagcaggtttgaaacactctttttgtagtgtctgtaagtgaacatttggattgctttcaggcctaaggtgaaaaaggaaatatcttcccataaaaactagacagaagcattctcagaaacttgtttgtgatgtgtgccctctactgacagagttgaacctttctttgcaaagagcagttttgaaacactctttttgtagaatctgcaagaggatatttggatagctttgaggatttcttgggaaacgggaatgtcttcagataaactctagacagaagcattctcagaaacttctttgggatgtttcaattgaagtcacagtgttgaacattccctttcacagagcaggtttgaaacactctttttgtagtgtctataagtgaacatttggcgtgctttcaggcctaacgtgaaaaaggaaatatcttcccataaaaactagacagaagcattctcagaaacttgttcgtgatgtgtgccctctactgacagagttgaacctttctttgcaaagagcagctttgaaacacactttttgtagaatctgcaagaggatatttggatagctttgaggatttcgttggaaacgggtatgtcttcagataaactctagacagaagcattctcagaaacttctttgggatgttgcattcaagtcacagagtagaacattcccattcatagagcagatttgaaacactctttttgtagtatctggaagtggacatttggagcgctttcaggcctatgttgaaaaaggaaatatcttcccataaaaactagacggaagcattctcagaaacttatttgtgatgtgtttgctcaactaacaggattgaaccatcgttttgaaggagcagttttgaaacactgttttcgtggaatctgcaagtggatatttggctagctttgaggatttcgttggaaacgggattacatataaaaaggagacagcagcattctcagaaacttctttgtgatgtctgcattcaagtcacagagttgagcattccctttcatagagcaggttggaaacactctttttgtagtatctggatgaggacatttggagcgctttcaggcgtatggtgaaaaaggaaatatcttcccgtaaaaactagacagaagcattctcagaagtttatttgtgatgtgtgccctcaactaacagagttgaacctttcttttgatagagcagttttgaaacactctttttgtaaaatctgcaagaggatatttggatagctttgaggatttcgttgcaaacgggaatggcttcatataaactctagacagaaagcattctcagaaacttcgttgggatgtttcgattgaagtcccagtgttgaacattcccttttatagagcaggttggaaacactctttctgcattccctggaagtggacatttggagcgctttcaggacgacggtgaaaatggaaatatcttccaagaaaatctagatagaagcaacgtcagaaacttttctgtgatggatctactcagctaacagagttgaacctttcttttgagagagcagttttgcaacactctttttgtggaatatgcaagtggatattagggcagctttgaggatttcgttggaaacgggaatacatgtaaaaagcagacagcaagcattctcagaaacttctttgtgatgtttgcattgaagtcacagagttgaacattccctttgagagagcaggattgaaacacgccttttgtcatatctggaagtgtccattcggagcgcattcaggcttgtgttgaaaaaggaaatatcctcccataaaaagtatacagaagcattctcagaaacttatttgtgatgtatgtactcaactaacagaactaaaccatcgttttgacggagcagttttgaaacactctttttgcggaatctgcaagtggatatttggctagctgggaggatttcgttggaaacgggattacatacaaaaagcagagagcagcattctcagaaacttctttgtgatgtttgcattcaagtcacagagttgaacattccctttcatagagcaggtttgaaacactctttttgtagtatctggatgtggacatttggatcgctttcaggcctatggtgaaaaaggaaatatcttcccatgaaaactagacagaagcattctcagaaacttatttgtgatgtgtgccctcaactgacagtgttgaacctttgttttgatagagcagttctgaaacacactttttgtaaaatctgcaagaggatatttggatagctttgaggatttcgttggaaacgggaatgtcttcatgtaaactctagacagaagcattctcagaaactgctttgggatgtttcaattgaagtcccagtgttgaacattccctttcatagagcaggtttgaaacactctttttgtactatctggaagtggacatttggagcgctttcaggtctacggtgaaaaaggagatatcttccaataaaaactagatagaagcaatgtcagaacttttttcatgatgtatctactcagcaaacagagttgaacctttcttttgagagagcagttttgaaacactctttttgtggaatatgcaagtgggtattaggccagcttggaggatttcgttggaaacgggaatacgtataaaaagcagacagcagcattgtcagaaactactttgtgatgtttgcattcaagtcacagaattgaacactccctttcacagagcaggtttgaaacactctttttgtagtgtctgtaagtgaacatatggattgctttcaggcctaaggtgaaaaaggaaatatcttcccataaaaactagacagaagcattctcagaaacttgtttgtgatgtgtgccctctactgacagatttgaacctttctttgcaaagagcagttttgaaacactctttttgtagaatctgcaagaggatatttggatagctttgaagatttcttgggaaacgggaatgtcttcagataaactctagacagaagcattctcagaaacttctttgggatgtttcaattgaagtcacagtgttgaacattccctttcacagagcaggtttgaaacactctttttgtagtgtgtataagtgaatatttcgcgtgctttcaggcctaacgtgaaaaaggaaatatcttcccataaaaactagacagaagcattctcagaaacttgttcatgatgtgtgccctctactgacagagttgaacctttctttgcaaagagcagctttgaaacactctttttgtagaatctgcaagaggatatttggatagcttggaggatttcgttggaaacgggtatgtcttcagataaactctagacagaagcattctcagaaacttctttgggatgttgcattcaagtcacagagtagaacattcccattcatagagcagatttgaaacactctttttgtagtatctggaagtggacatttggagcgctttcaggcctatgttgaaaaaggaaatatcttcccataaaaactagacggaagcattctcagaaacttatttgtgatgtgtttgctcaactaacaggattgaaccatcgttttgaaggagcagttttgaaacactgttttcgtggaatctgcaagtggatatttggctagctttgaggatttcgttggaaacgggattacatatacaaaggagacagcagcattctcagaaacttctttgtgatgtctgcattcaattcacagagttgagcattccctttcatagagcaggttggaaacactctttttgtagtatctggatgaggacatttggagcgctttcaggcgtatggtgaaaaaggaaatatcttcccgtaaaaactagacagaagcattctcagaagtttatttgtgatgtgtgccctcaactaacagagttgaacctttcttttgatagagcagttttgaaacactctttttgtaaaatctgcaagaggatatttggatagctttgaggatttcgttgcaaacgggaatggcttcatataaactctagacagaagcattctcagaaacttcgttgggatgtttcgattgaagtcccagtgttgaacattcccttttatagagcaggttggaaacactctttctgcattccctggaagtggacatttggagcgctttcaggacgacggtgaaaatggaaatatcttccaagaaaatctagatagaagcaacgtcagaaacttttctgtgatggatctactcagctaacagagttgaacctttcttttgagagagcagttttgcaacactctttttgtggaatatgcaagtggatattagggcagctttgaggatttcgttggaaacgggaatacatgtaaaaagcagacagcagcgttctcagaaacttctttgtgatgtttgcattgaagtcacagagttgaacattccctttgagagagcaggtttgaaacacgccttttgtcatatctggaagtgtccattcggagcgcattcaggcttgtgttgaaaaaggaaatatcctcccataaaaactagacagaagcattctcagaaacttatctgtgatgtatgtactcaactaacagaactaaaccatcgttttgaaggagcagttttgaaacactctttttgcggaatctgcaagtggatatttggctagctgggaggatttcgttggaaacgggattacatacaaaaagcagacagcagcattctcagaaacttctttgtgatgtttgcattcaagtcacagagttgaacattccctttcatagagcaggtttgaaacactctttttgtagtatctggatgtggacatttggatcgctttcaggcctatggtgaaaaaggaaatatcttcccatgaaaactagacagaagcattctcagaaacttatttgtgatgtgtgccctcaactgacagtgttgaacctttgttttgatagagcagttctgaaacacactttttgtaaaatctgcaagaggatatttggatagctttgaggatttcgttggaaacgggaatgtcttcatgtaaactctacacagaagcattctcagaaactgctttgggatgtttcaattgaagtcccagtgttgaacattccctttcatagagcaggtttgaaacactctttttgtactatctggaagtggacatttggagcgctttcaggtctacggtgaaaaaggagatatcttccaataaaaactagatagaagcaatgtcagaacttttttcatgatgtatctactcagcaaacagagttgaacctttcttttgagagagcagttttgaaacactctttttgtggaatatgcaagtgggtattaggccagcttgaaggatttcgttggaaacgggattacgtataaaaagcagacagcagcattgtcagaaactactttgtgatgtttgcattcaagtcacagaattgaacactccctttcacagagcaggtttgaaactctctttttgtagtgtctgtaagtgaacatttggattgctttcaggcctaaggtgaaaaaggaaatatcttcccataaaaactagacagaagcattctcagaaacttgtttgtgatgtgtgccctctactgacagagttgaacctttctttgcaaagagcagttttgaaacactctttttgtagaatctgcaagaggatatttggatagctttgaggatttcttgggaaacgggaatgtcttcagataaactctagacagaagcattctcagaaacttctttgggatgtttcaattgaagtcacagtgttgaacattccctttcacagagcaggtttgaaacactctttttgtagtgtctataagtgaacatttggcgtgctttcaggcctaacgtgaaaaaggaaatatcttcccataaaaactagacagaagcattctcagaaacttgtttgtgatgtgtgccctctactgacagagttgaacctttccttgcaaagagcagctttgaaacactctttttgtagaatctgcaagaggctatttggatagctttgaggatttcgttggaaacggttatgtcttcagataaactctagacagaaacattctcagaaacttctttgggatgttgcattcaagtcacagagtagaacattcccatgcatagagcagatttgaaacactctttttgtagtatctggaagtggacatttggagcgctttcaggcctatgttgaaaaaggaaatatcttcccataaaaactagacgggaagcattctcagaaacttatttgtgatgtgtttgctcaactaacaggattgaaccatcgttttgaaggagcagttttgaaacactgttttcgtggaatctgcaagtggatatttggctagctttgaggatttcgttggaaacgggattacatataaaaaggagacagcagcattctcagaaacttctttgtgatgtctgcattcaattcacagagttgagcattccctttcatagagcaggttggaaacactctttttgtagtatctggatgaggacatttggagcgctttcaggcgtatggtgaaaaaggaaatatcttcccgtaaaaactagacataagcattctcagaagtttatttgtgatgtgtgccctcaactaacagagttgaacctttcttttgatagagcagttttgaaacactctttttgtaaaatctgcaagaggatatttggatagctttgaggatttcgttgcaaacgggaatggcttcatataaactctagacagaagcattctcagaaacttcgttgggatgtttcgattgaagtcccagtgttgaacattcccttttatagagcaggttggaaacactctttctgcattccctggaagtggacatttggagcgctttcaggacaacggtgaaaatggaaatatcttccaagaaaatctagatagaagcaacgtcagaaacttttctgtgatggaactactcagctaacagagttgaacctttcttttgagagagcagttttgcaacactctttttgtggaatatgcaagtggatattaaggcagctttgaggatttcgttggaaacgggaatacatgtaaaaagcagacagcagcattctcagaaacttctttgtgatgtttgcattgaagtcacagagttgaacattccctttgagagagcaggtttgaaacacgccttttgtcatatctggaagtgtccattcggagcgcattcaggcttgtgttgaaaaaggaaatatcctcccagaaaaactagacagaagcattctcagaaacttatctgtgatgtatgtactcaactaacagaactaaaccatcgttttgaaggagcagttttgaaacactctttttgcggaatctgcaagtggatatttggctagctgggaggatttcgttggaaacgggattacatacaaaaagcagacagcagcattctcagaaacttctttgtgatgtttgcattcaagtcacagagttgaacattccctttcatagagcaggtttgaaacactctttttgtagtatctggatgtggacatttggatcgctttcaggcctatggtgaaaaaggaaatatcttcccatgaaaactagacagaagcattctcagaaacttatttgtgatgtgtgccctcaactgacagtgttgaacctttgttttgatagagcagttctgaaacacactttttgtaaaatctgcaagaggatatttggatagctttgaggatttcgttggaaacgggaatgtcttcatgtaaactctacacagaagcattctcagaaactgctttgggatgtttcaattgaagtcctagtgttgaacattcccattcatagagcaggtttgaaacactctttttgtactatctggaagtggacatttggagcgctttcaggtctacggtgaaaaaggagatatcttccaataaaaactagatagaagcaatgtcagaacttttttcatgatgtatctactcagcaaacagagttgaacctttcttttgagagagcagttttgaaacactctttttgtggaatatgcaagtgggtattaggccagcttggaggatttcgttggaaacgggaatacgtataaaaagcagacagcagcattgtcagaaactactttgtgatgtttgcatgcaagtcacagaatggaacactgcctttcacagagcaggtttgaaacactctttttgtagtgtctgtaagtgaacatttggattgctttcaggcctaaggtgaaaaaggaaatatcttcccataaaaactagacagaagcattctcagaaacttgtttgtgatgtgtgccctctactgacagagttgaacctttctttgcaaagagcagttttgaaacactctttttgtagaatctgcaagaggatatttggatagctttgaggatttcttgggaaacgggaatgtcttcagataaactctagacagaagcattctcagaaacttctttgggatgtttcaattgaagtcacagtgttgaacattccctttcacagagcaggtttgaaacactctttttgtagtgtctataagtgaacatttggcgtgctttcaggcctaacgtgaaaaaggaaatatcttcccataaaaactagacagaagcattctcagaaacttgttcgtgatgtgtcccctctactgacagagttgaacctttctttgcaaagagcagctttgaaacacactttttgtagaatctgcaagaggatatttggatagcttggaggatttcgttggaaacgggtatgtcttcagataaactctagacagaagcattctcagaaacttctttgggatgttgcattcaagtcacagagtagaacattcccattcatagagcagatttgaaacactctttttgtagtatctggaagtggacatttggagcgctttcaggcctatgttgaaaaaggaaatatcttcccataaaaactagacggaagcattctcagaaacttatttgtgatgtgtttgctcaactaacaggattgaaccatcgttttgaaggagcagttttgaaactctgttttcgtggaatctgcaagtggatatttggctagctttgaggatttcgttggaaacgggattacatataaaaaggagacagcagcattctcagaaacttctttgtgatgtttgcattcaattcacagagttgagcattccctttcatagagcaggtttgaaacactctttttgtagtatctggatgtggacatttggatcgctttcaggcctatggtgaaaaaggaaatatcttcccatgaaaactagacagaagcattctcagaaacttatttgtgatgtgtgccctcaactgacagtgttgaacctttgttttgatagagcagttctgaaacacactttttgtaaaatctgcaagaggatatttggatagctttgaggatttcgttggaaacgggaatgtcttcatgtaaactctacacagaagcattctcagaaactgctttgggatgtttcaattgaagtcccagtgttgaacattccctttcatagagcaggtttgaaacactctttttgtactatctggaagtggacatttggagcgctttcaggtctacggtgaaaaaggagatatcttccaataaaaactagatagaagcaatgtcagaacttttttcatgatgtatctactcagcaaacagagttgaacctttcttttgagagagcagttttgaaacactctttttgtggaatatgaaagtgggtattaggccagcttggaggatttcgttggaaacgggaatacgtataaaaagcagacagcagcattgtcagaaactactttgtgatgtttgcattcaagtcacagaactgaacactccctttcacagagcaggtttgaaacactctttttgtagtgtctgtaagtgaacatttggattgctttcaggcctaaggtgaaaaaggaaatatcttcccataaaaactagacagaagcattctcagaaacttgtttgtgatgtgtgccctctactgacagagttgaacctttctttgcaaagagcagttttgaaacactctttttgtagaatctgcaagaggatatttggatagatttgaggatttcttgggaaacgggaatgtcttcagataaactctagacagaagcattctcagaaacttctttgggatgtttcaatagaagtcacagtgttgaacattccctttcacagagcaggtttgaaacactctttttgtagtgtctataattgaacatttggcgtgctttcaggcctaacgtgaaaaaggaaatatcttcccataaaaactagacagaagcattctcagaaacttgttcttgatgtgtcccctctactgacagagttgaacctttctttgcaaagagcagctttgaaacactctttttgtagaatctgcaagaggatatttggatagcttggaggatttcgttggaaacgggtatgtcttcagataaactctagacagaagcattctcagaaacttctttgggatgttgcattcaagtcacagagtagaacattcccattcatagagcagatttgaaacactctttttgtagtatctggaagtggacatttggagcgctttcaggcctatgttgaaaaaggaaatatcttcccataaaaactagacggaagcattctcagaaacttacttgtgatgtgtttgctcaactaacagaattgaaccatcgttttgaaggagcagttttgaaacactgttttcgtggaatctgcaagtggatatttggctagctttgaggatttcgttggaaacgggattacatataaaaaggagacagcaagcattctcagaaacttctttgtgatgtttgcattcaagtcacagagttgaacattccctttcatagagcaggtttgaaacactctttttgtagtatctggatgtggacatttggatcgctttcaggcctatggtgaaaaaggaaatatcttcccatgaaaactagacagaagcattctcagaaacttatttgtgatgtgtgccctcaactgacagtgttgaacctttgttttgatagagcagttctgaaacacactttttgtaaaatctgcaagaggatatttggatagctttgaggatttcgttggaatcgggaatttcttcatgtaaactctggacagaagcattctcagaaactgctttgggatgtttcaattgaagtcccagtgttgaacattccctttcatagagcaggtttgaaacactctttttgtactatctggaagtggacatttggagcgctttcaggtctacggtgaaaaaggagatatcttccaataaaaactagatagaagcaatgtcagaacttttttcatgatgtatctactcagcaaacagagttgaacttttcttttgagagagcagttttgaaacactctttttgtggaatatgcaagtgggtattaggccagcttggaggatttcgttggaaacgggaatacgtataaaaagcagacagcagcattgtcagaaactactttgtgatgtttgcattcaagtcacagaattgaacactccctttcacagagcaggtttgaaacactctttttgtagtgtctgtaagtgaacatttggattgctttcaggcctaaggtgaaaaaggaaatatcttcccataaaaactagacagaagcattctcagaaacttgtttgtgatgtgtgccctctactgacagagttgaacctttctttgcaaagagcagttttgaaacactctttttgtagaatctgcaagaggatatttggatagctttgaggatttcttgggaaacgggaatgtcttcagataaactctagacagaagcattctcagaaacttctttgggatgtttcaattgaagtcacagtgttgaacattccctttcacagagcaggtttgaaacactctttttgtagtgtctataagtgaacatttggcgtgctttcaggcctaacgtgaaaaaggaaatatcttcccataaaaactagacagaagcattctcagaaacttgttcgtgatgtgtgccctctactgacagagttgaacctttttttgcaaagagcagctttgaaacactctttttgtagaatctgcaagaggatatttggatagctttgaggatttcgttggaaacgggtatgtcttcagataaactctagacagaagcattctcagaaacttctttgggatgttgcattcaagtcacagagtagaacattcccattcatagagcagatttgaaacactctttttgtagtatctggaagtggacatttggagcgctttcaggcctatgttgaaaaaggaaatatcttcccataaaaactagacggaagcattctcagaaacttatttgtgatgtgtttgctcaactaacaggattgaaccatcgttttgaaggagcagttttgaaacactgttttcgtggaatctgcaagtggatatttggctagctttgaggatttcgttggaaacgggataacatataaaaaggagacagcagcattctcagaaacttctttgtgatgtttgcattcaagtcacagagttgaacattccctttcatagagcaggtttgaaacactctttttgtagtatctggatgtggacatttggatcgctttcaggcctatggtgaaaaaggaaatatcttcccatgaaaactagacagaagcattctcagaaacttatttatgatgtgtgccctcaactgacagtgttgaacctttgttttgatagagcagttctgaaacacactttttgtaaaatctgcaagaggatatttggatagctttgaggatttcgttggaaacgggaatgtcttcatgtaaactctagacagaagcattctcagaaactgctttgggatgtttcaattgaagtcccagtgttgaacattccctttcatagagcaggtttgaaacactctttttgtactatctggaagtggacatttggagcgctttcaggtctacggtgaaaaaggagatatcttccaataaaaactagatagaagcaatgtcagaacttttttcatgatgtatctactcagcaaacagagttgaacctttcttttgagagagcagttttgaaacactctttttgtggaatatgcaagtgggtattaggccagcttggaggatttcgttggaaacgggaatacgtataaaaagcagacagcagcattgtcagaaactactttgtgatgtttgcattcaagtgacagaattgaacactccctttcacagaccaggtttgaaacactctttttgtagtgtctgtaagtgaacatttggattgctttcaggcctaaggtgaaaaaggaaatatcttcccataaaaactagacagaagcattctcagaaacttgtttgtgatgtgtgccctctactgacagagttgaacctttctttgcaaagagcagttttgaaacactctttttgtagaatctgcaagaggatatttggatagctttgaggatttcttgggaaacgggaatgtcttcatgtaaactctggacagaagcattctcagaaacttctttgggatgtttcaattgaagtcacagggttgaacattccctttcacagagcaggtttgaaacactctttttgtagtgtctataagtgaacatttggcgtgatttcaggccaaacgtgaaaaaggaaatatcttcccataaaaactagacagaagcattctcagaaacttgttcttgatgtgtcccctctactgacagagttgaacctttctttgcaaagagcagctttgaaacactctttttgtagaatctgcaagaggatatttggatagcttggaggatttcgttggaaacgggtatgtcttcagataaactctagacagaagcattctcagaaacttctttgggatgttgcattcaagtcacagagtagaacattcccattcatagagcagatttgaaacactctttttgtagtatctggaagtggacatttggagcgctttcaggcctatgttgaaaaaggaaatatcttcccataaaaactagacggaagcattctcagaaacttatttgtgatgtgtttgctcaactaacaggattgaaccatcgttttgaaggagcagttttgaaacactgttttcgtggaatctgcaagtggatatttggctagctttgaggatttcgttggaaacgggattacatataaaaaggagacagcagcattctcagaaacttctttgtgatgtctgcattcaattcacagagttgagcattccctttcatagagcacgttggaaacactctttttgtagtatctggatgaggacatttggagcgctttcaggcatatggtgaaaaaggaaatatcttcccgtaaaaactagacagaagcattctcagaaatttatttgtgatgtgtgccctcaactaacagagttgaacctttcttttgatagagcagttttgaaacactctttttgtaaaatctgcaagaggatatttggatagctttgaggatttcgttgcaaacgggaatggcttcatataaactctagacagaagcattctcagaaacttcgttgggatgtttcgattgaagtcccagtgttgaacattcccttttatagagcagattggaaacactctttttgcattccctggaagtggacatttggagcgctttcaggacgacggtgaaaatggaaatatcttccaagaaaatctagatagaagcaacgtcagaaacttttatgtgatggatctactcagctaacagcagttgaacctttcttttgagagagcagttttgcaacactctttttgtggaatatgcaagtggatattagggcagctttgaggatttcgttggaaacgggaatacatgtaaaaaggagacagcagcattctcagaaacttctttgtgatgtttgcattgaagtcacagagttgaacattccctttgagagagcaggtttgaaacacgccttttgtcatatctggaagtgtccattcggagcgcattcaggcttgtgttgaaaaaggaaatatcctcccataaaaactagacagaagcattctcagaaacttatctgtgatgtatgtacctcaactaacagaactaaaccatcgttttgaaggagcagttttgaaacactctttttgcggaatctgcaagtggatatttggctagctgggaggatttcgttggaaacgggattacatacaaaaagcagacagcagcattctcagaaacttctttgtgatgtttgcattcaagtcacagagttgaacattccctttcatagagcaggtttgaaacactctttttgtagtatctggatgtggacatttggatcgctttcaggcctatggtgaaaaaggaaatatcttcccatgaaaactagacagaagcattctcagaaacttatttgtgatgtgtgccctcaactgacagtgttgaacctttgttttgatagagcagttctgaaacacactttttgtaaaatctgcaagaggatatttggatagctttgaggatttcgttggaaacgggaatgtcttcatgtaaactctacacagaagcattctcagaaactgctttgggatgtttcaattgaagtcccagtgttgaacattcccattcatagagcaggtttgaaacactctttttgtactatctggaagtggacatttggagcgctttcaggtctacggtgaaaaaggagatatcttccaataaaaactagatagaagcaatgtcagaacttttttcatgatgtatctactcagctaacagagttgaacctttcttttgagagagcagttttgaaacactctttttgtggaatatgcaagtgggtattaggccagcttggaggatttcgttggaaacgggaatacgtataaaaagcagacagcagcattgtcagaaactactttgtgatgtttgcattcaagtcacagaattgaacactccctttcacagagcaggtttgaaacactctttttgtagtgtctataagtgaacatttggcgtgctttcaggcctaaggtgaaaaaggaaatatcttcccataaaaactagacagaagcattctcagaaacttgttcttgatgtgtgccctctactgacagagttgaacctttctttgcaaagagcagttttgaaacactctttttgtagaatctgcaagaggatatttggatagctttgaggatttcttgggaaacgggaatgtcttcagataaactctagacagaagcattctcagaaacttctttgggatgtttcaattcaagtcacagtgttgaacattccctttcacagagcaggtttgaaacactctttttgtagtgtctataagtgaacatttggcgtgctttcaggcgtaacgtgaaaaaggaaatatcttcccataaaaactagacagaagcattctcagaaacttgttcttgatgtgtcccctctactgacagagttgaacctttctttgcaaagagcagctttgaaacactctttttgtagaatctgcaagaggatatttggatagcttggaggatttcgttggaaacgggtatgtcttcagataaactctagacagaagcattctcagaaacttctttgggatgttgcattcaagtcacagagtagaacattcccattcatagagcagatttgaaacactctttttgtagtatctggaagtggacatttggagcgctttcaggcctatgttgaaaaaggaaatatcttcccataaaaactagacggaagcattctcagaaacttaattgtgatgtgtttgctcaactaacaggattgaaccatcgttttgaaggagcagttttgaaacactgttttcgtggaatctgcaagtggatatttggctagctttgaggatttcgttggaaacgggattacatatacaaaggagacagcagcattctcagtaaacttctttatgatgtctgcattcaagtcacagagttgagcattccctttcatagagcaggttggaaacactctttgtgtagtatctggatgaggacatttggagtgctttcaggcgtatggtgaaaaaggaaatatcttcccgtaaaaactagacagaagcattctcagaagtttatttgtgatgtgtgccctcaactaacagagttgaacctttcttttgatagagcagttttgaaacactctttttgtaaaatctgctagaggatatttggatagctttgaggatttcgttgcaaacgggaatggcttcatataaactctagacagaagcattctcagaaacttcgttgggatgtttcgattgaagtcccagtgttgaacattcccttttatagagcaggttggaaacactctttctgcattccctggaagtggacatttggagcgctttcaggacgacggtgaaaatggaaatatcttccaagaaaatctagatagaagcaacagtcagaaacttttctgtgatggatctactcagctaacagagttgaacctttcttttgagagagcagttttgcaacactctttttgtggaatatgcaagtggatattagggcagctttgaggatttcgttggaaacgggaatacatgtaaaaagcagacagcagcattctcagaaacttctttgtgatgtttgcattgaagtcacagagttgaacattccctttgagagagcaggtttgaaacacgccttttgtcatatctggaagtgtccattcggagcgcattcaggcttgtgttgaaaaaggaaatatcctcccataaaaactagacagaagcattctcagaaacttatctgtgatgtatgtactcaactaacagaactaaaccaccgttttgaaggagcagttttgaaacactctttttgcggaatctgcaagtggatatttggctagctgggaggatttcgttggaaacgggattacatacaaaaagcagacagcagcattctcagaaacttctttgtgatgtttgcattcaagtcacagagttgaacattccctttcatagagcaggtttgaaacactctttttgtagtatctggatgtggacatttggatcgctttcaggcctatggtgaaaaaggaaatatcttcccatgaaaactagacagaagcattctcagaaacttatttgtgatgtgtgccctcaactgacagtgttgaacctttgttttgatagagcagttctgaaacacactttttgtaaaatctgcaagaggatatttggatagctttgaggatttcgttggaaacgggaatgtcttcatgtaaactctacacagaagcattctcagaaactgctttgggatgtttcaattgaagtcccagtgttgaacattcccattcatagagcaggtttgaaacactctttttgtactatctggaagtggacatttggagcgctttcaggtctacggtgaaaaaggagatatcttccaataaaaactagatagaagcaatgtcagaacttttttcatgatgtatctactcagcaaacagagttgaacctttcttttgagagagcagttttgaaacactctttttgtggaatatgcaagtgggtattaggccagcttggaggatttcgttggaaacgggaatacgtataaaaagcagacagcagcattgtcagaaactactttgtgatgtttgcattcaagtcacagaattgaacactccctttcacagagcaggtttgaaacactctttttgtagtgtctgtaagtgaacatttggattgcttcaggcctaaggtgaaaaaggaaatatcttcccataaaaactagacagaagcattctcagcaaacttgtttgtgatgtgtgccctctactgacagagttgaaactttctttgcaaagagcagttttgaaacactctttttgtagaatctgcaagaggatatttggatagctttgaggatttcttgggaaacgggaatgtcttcagataaactctagacagaagcattctcagaaacttctttgggatgtttcaattgaagtcacagtgttgaacattccctttcacagagcaggtttgaaacactctttttgtagtgtctataagtgaacatttggcgtgctttcaggcgtaacgtgaaaaaggaaatatcttcccataaaaactagacagaagcattctcagaaacttcttcgtgatgtgtgccctctactgacagagttgaacctttctttgcaaagagcagctttgaaacactctttttgtagaatctgcaagaggatatttggatagcttggaggatttcgttggaaacgggtatgtcttcagataaactctagacagaagcattctcagaaacttctttgggatgttgcattcaagtcacagagtagaacattcccattcatagagcagatttgaaacactctttttgtagtatctggaagtggacatttggagcgctttcaggcctatgttgaaaaaggaaatatcttcccataaaaactagacggaagcattctcagaaacttacttgtgatgtgtttgctcaactaacagaattgaaccatcgttttgaaggagcagttttgaaacactgttttcgtggaatctgcaagtggatatttggctagctttgaggatttcgttggaaacgggattacatataaaaaggagacagcttttttttttttttgagacagagtcttgctctgttgcccaggctggtctcagtgggatcctctagagtcgacctgcaaggagcgctttcaggcgtatggtgaaaaaggaaatatcttcccgtaaaaactagacagaagnnnnnnnnnnnnnnnnnnnnnnnnnnnnnnnnnnnnnnnnnnnnnnnnnnnnnnnnnnnnnnnnnnnnnnnnnnnnnnnnnnnnnnnnnnnnnnnnnnnnagcattctcagaagtttatttgtgatgtgtgccctcaactaacagagttgaacctttcttttgatagagcagttttgaaacactctttttgtaaaatctgcaagaggatatttggatagctttgaggatttcgttgcaaacgggaatggcttcatataaactctagacagaagcattctcagaaacttcgttgggatgtttcgattgaagtcccagtgttgaacattcccttttatagagcaggttggaaacactctttctgcattccctggaagtggacatttggagcgctttcaggacgacggtgaaaatggaaatatcttccaagaaaatctagatagaagcaacgtcagaaacttttatgtgatggatctactcagctaacagagttgaacctttcttttgagagagcagttttgcaacactctttttgtggaatatgcaagtggatattagggcacctttgaggatttcgttggaaacgggaatacatgtaaaaagcagacagcagcattctcagaaacttctttgtgatgtttgcattgaagtcacagagttgaacattccctttgagagagcaggtttgaaacacgccttttgtcatatctggaagtgtccattcggagcgcattcaggcttgtgttgaaaaaggaaatatcctcccataaaaactagacagaagcattctcagaaacttatctgtgatgtatgtactcaactaacagaactaaaccatcgttttgaaggagcagttttgaaacactctttttgcggaatctgcaagtggatatttggctagctgggaggatttcgttggaaacgggattacatacaaaaagcagacagcagcattctcagaaacttctttgtgatgtttgcattcaagtcacagagttgagcattccctttcatagagcaggttggaaacactctttttgtagtatctggatgtggacatttggatcgctttctggcgtatggtgaaaaaggaaatatcttcccatgaaaactagacagaagcattctcagaagtttatttgtgatgtgtgccctcaactaacagagttgaacctttcttttgatagagcagttttgaaacactctttttgtaaaatctgcaagaggatatttggatagctttgaggatttcgttgcaaacgggaatggcttcatataaactctagacagaagcattctcagaaacttcgttgggatgtttcgattgaagtcccagtgttgagcattcccttttatagagcaggttggaaacactctttctgcattccctggaagtggacatttggagcgctttcaggacgacggtgaaaatggaaatatcttccaagaaaatctagatagaagcaacgtcagaaacttttatgtgatggatctactcagctaacagagttgaagctttcttttgagagagcagttttgcaacactctttttgtggaatatgcaagtggatattagggcagctttgaggatttcgttggaaacgggaatacatgtaaaaagcagacagcagcattctcagaaacttctttgtgatgtttgcattgaagtcacagagttgaacattccctttgagagagcaggtttgaaacacgccttttgtcatatctggaagtgtccattcggagcgcattcaggcttgtgttgaaaaaggaaatatcctcccataaaaactagacagaagcattctcagaaacttatctgtgatgtatgtactcaactaacagaactaaaccatcgttttgaaggagcagttttgaaacactctttttgcggaatctgcaagtggatatttggctggctgggaggatttcgttggaaacgggattacatacaaaaagcagacagcagcattctcagaaacttctttgtgatgtttgcattcaagtcacagagttgaacattccctttcatagagcaggtttgaaacactctttttgtagtatctggatgtggacatttggatcgctttcaggcctatggtgaaaaaggaaatatcttcccatgaaaactagacagaagcattctcagaaacttattggtgatgtgtgccctcaactgacagtgttgaacctttgttttgatagagcagttctgaaacacactttttgtaaaatctgcaagaggatatttggatagctttgaggatttcgttggaaacgggaatgtcttcatgtaaactctacacagaagcattctcagaaactgctttgggatgtttcaattgaagtcccagtgttgaacattcccattcatagagcaggtttgaaacactctttttgtactatctggaagtggacatttggagcgctttcaggtctacggtgaaaaaggagatatcttccaataaaaactagatagaagcaatgtcagaacttttttcatgatgtatctactcagcaaacagagttgaacctttcttttgagagagcagttttgaaacactctttttgtggaatatgcaagtgggtattaggccagcttggaggatttcgttggaaacgggaatacgtataaaaagcagacagcagcattgtcagaaactactttgtgatgtttgcattcaagtcacagaattgaacactccctttcacagagcaggtttgaaacactctttttgtagtgtctgtaagtgaacatatggattgctttcaggcctaaggtgaaaaaggaaatatcttcccataaaaactagacagaagcattctcagaaacttgtttgtgatgtgtgccctctactgacagagttgaacctttctttgcaaagaccagttttgaaacactctttttgtagaatctgcaagaggatatttggatagctttgaggatttcttgggaaacgggaatgtcttcagataaactctagacagaagcattctcagaaacttctttgggatgtttcaattgaagtcacagtgttgaacattccctttcacagagcaggtttgaaacactctttttgtagtgtctataagtgaacatttggcgtgctttcaggcgtaacgtgaaaaaggaaatatcttcccataaaaactagacagaagcattctcagaaacttgttcgtgatgtgtgccctctactgacagagttgaacctttctttgcaaagagcagctttgaaacacactttttgtagaatctgcaagaggatatttggatagcttggaggatttcgttggaaacgggtatgtcttcagataaactctagacagaagcattctcagaaacttcttcgggatgttgcatgcaagtcacagagtagaacattcccattcatagagcagatttgaaacactctttttgtagtatctggaagtggacatttggagcgctttcaggcctatgttgaaaaaggaaatatcttcccataaaaactagacggaagcattctcagaaacttacttgtgatgtgtttgctcaactaacagaattgaaccatcgttttgaaggagcagttttgaaacactgttttcgtggaatctgcaagtggatatttggctagctttgaggatttcgttggaaacgggattacatataaaaaggagacagcagcattctcagaaagttctttgtgatgtctgcattcaattcacagagttgagcattccctttcatagagcaggttggaaacactctttttgtagtatctggatgaggacatttggagcgctttcaggcctatggtgaaaaaggaaatatcttcccgtaaaaactagacagaagcattctcagaaatttatttgtgatgtgtgccctcaactaacagagttgaacctttcttttgatagagcagttttgaaacactctttttgtaaaatctgcaagaggatatttggatagctttgaggatttcattgcaaacgggaatggcttcatataaactctagacagaaagcattctcagaaacttcgtcgggatgtttcgattgaagtcccagtgttgaacattcccttttatagagcaggttggaaacactctttctgcattccctggaagtggacaattggagcgctttcaggacgacggtgaaaatggaaatatcttccaataaaatctggatagagcaatgtcagaaactattctgtgatggatctactcagctaacagagttgaacctttcttttgagagagcagttttgcaacactctttttgtggaatatgcaagtggatattagggcagctttgaggatttcgttggaaacgggaatacatgtaaaaagcagacagcagcattctcagaaacttctttgtgatgtttgcattgaagtcacagagttgaacattccctttgagagagcaggtttgaaacacgccttttgtcatatctggaagtgtccattcggagcgcattcaggcttgtgttgaaaaagaaaatatcctcccataaaaactagacagaagcattctcagaaacttatttgtgatgtatgtactcaactaacagaactaaaccatcgttttgacggagcagttttgaaacactctttttgcggaatctgcaagtggatatttggctagctgggaggatttcgttggaaacgggattacatacaaaaagcagagagcagcattctcagaaacttatttgtgatgtgtgccctcaactgacagtgttgaacctttgttttgatagagcagttctgaaacacactttttgtaaaatctgcaagaggatatttggatagctttgaggatttcgttggaaacgggaatgtcttcatgtaaactctagacagaagcattctcagaaactgctttgggatgtttcaattgaagtcccagtgttgaacattcccattcatagagcaggtttgaaacactctttttgtactatctggaagtggacatttggagcgctttcaggtcctacggtgaaaaaggagatatcttccaataaaaactagatagaagcaatgtcagaacttttttcatgatgtatctactcagcaaacagagttgaacctttcttttgagggagcagttttgaaacactatttttgtggaatatgcaagtgggtattaggccagcttggaggatttcgttggaaacgggaatacgtataaaaagcagacagcagcattgtcagaaactactttgtgatgtttgcattcaagtcacagaattgaacactccctttcacagagcaggtttgaaacactctttttgtagtgtctgtaagtgaacatatggattgctttcaggcctaaggtgaaaaaggaaatatcttcccataaaacctagacagaagcattctcagaaacttgtttgtgatgtgtgccctctactgacagagttgaacctttctttgcaaagaccagttttgaaacactctttttgtagaatctgcaagaggatatttggatagctttgaggatttcttgggaaacgggaatgtcttcagataaactctagacagaagcattctcagaaacttctttgggatatttcaattgaagtcacagtgttgaacattccctttcacagagcaggtttgaaacactctttttgtagtgtctataagtgaacatttggcgtgctttcaggcctaacgtgaaaaaggaaatatcttcccataaaaactagacagaagcattctcagaaacttgttcgtgatgtgtgccctctactgacagagttgaacctttctttgcaaagagcagctttgaaacactctttttgtagaatctgcaagaggatatttggatagctttgaggatttcgttggaaacgggtatgtcttcagataaactctagacagaagcattctcagaaacttctttgggatgttgcattcaagtcacagagtagaacattcccattcatagagcagatttgaaacactctttttgtagtatctggaagtggacatttggagcgctttcaggcctatgttgaaaaaggaaatatcttcccataaaaactagacggaagcattctcagaaacttacttgtgatgtgtttgctcaactaacagaattgaaccatcgttttgaaggagcagttttgaaacactgttttcgtggaatctgcaagtggatatttggctagctttgaggatttcgttggaaacgggattacatataaaaaggagacagcagcattctcagaaacttctttgtgatgtctgcattcaagtcacagagttgagcattccctttcatagagcaggttggaaacactctttttgtagtatctggatgaggacatttggagcgctttcaggcgtatggtgaagaaggaaatatcttcccgtaaaaactagacagaagcattctcagaaatttatttgtgatgtgtgccctcaactaacagagttgaacctttcttttgatagagcagttttgaaacactctttttgtaaaatctgcaagaggatatttggatagctttgaggatttcgttgcaaacgggaatggcttcatataaactctagacagaagcattctcagaaacttcgttgggatgtttcgattgaagtcccagtgttgaacattcccttttatagagcaggttggaaacactctttctgcattccctggaagtggacatttggagcgctttcaggacgacggtgaaaatggaaatatcttccaagaaaatctagatagaagcaacgtcagaaacttttctgtgatggatctactcagctaacagagttgaacctttcttttgagagagcagttttgcaacactctttttgtggaatatgcaagtggatattagggcagccttgaggatttcgttggaaacgggaatacatgtaaaaagcagacagcagcattctcagaaacttctttgtgatgtttgcattgaagtcacagagttgaacattccctttgagagagcaggtttgaaacacgccttttgtcatatctggaagtgtccattcggagcgcattcaggcttgtgttgaaaaaggaaatatcctcccataaaaactagacagaagcattctcagaaacttatctgtgatgtatgtactcaactaacagaactaaaccatcgttttgaaggagcagttttgaaacactctttttgcggaatctgcaagtggatatttggctagctgggaggatttcgttggaaacgggattacatacaaaaagcagacagcagcattctcagaaacttctttgtgatgtttgcattcaagtcacagagttgaacattccctttcatagagcaggtttgaaacactctttttgtagtatctggatgtggacatttggatcgctttcaggcctatggtgaaaaaggaaatatcttcccatgaaaactagacagaagcattctcagaaacttatttgtgatgtgtgccctcaactgacagtgttgaacctttgttttgatagagcagttctgaaacacactttttgtaaaatctgcaagaggatatttggatagctttgaggatttcgttggaaacgggaatgtcttcatgtaaactctacacagaagcattctcagaaactgctttgggatgtttcaattgaagtcccagtgttgaacattcccattcatagagcaggtttgaaacactctttttgtactatctggaagtggacatttggagcgctttcaggtctacggtgaaaaaggagatatcttccaataaaaactagatagaagcaatgtcagaacttttttcatgatgtatctactcagcaaacagagttgaagctttcttttgagagagcagttttgaaacactctttttgtggaatatgcaagtgggtattaggccagcttggaggatttcgttggaaacgggaatacgtataaaaagcagacagcagcattgtcagaaactactttgtgatgtttgcattcaagtcacagaattgaacactccctttcacagagcaggtttgaaacactctttttgtagtgtctgtaagtgaacatttggattgctttcaggcctaaggtgaaaaaggaaatatcttcccataaaaactagacagaagcactctcagaaacttgtttgtgatgtgtgccctctactgacagagttgaacctttctttgcaaagagcagttttgaaacactccttttgtagaatctgcaagaggatatttggatagctttgaggatttcttgggaaacgggaatgtcttcagataaactctagacagaagcattctcagaaacttctttgggatgtttcaattgaagtcacagtgttgaacattccctttcacagagcaggtttgaaacactctttttgtagtgtctataagtgaacatttggcgtgctttcaggcctaacgtgaaaaaggaaatatcttcccataaaaactagacagaagcattctcagaaagttgttcgtgatgtgtgccctctactgacagagttgaacctttctttgcaaagagcagctttgaaacacactttttgtagaatctgcaagaggatatttggatagctttgaggatttcgttggaaacgggtatgtcttcagataaactctagacagaagcattctcagaaacttctttgggatgttgcattcaagtcacagagtagaacattcccattcatagagcagatttgaaacactctttttgtagtatctggaagtggacatttggagcgctttcaggcctatgttgaaaaaggaaatatcttcccataaaaactagacggaagcattctcagaaacttacgtgtgatgtgtttgctcaactaacagaattgaaccatcgttttgaaggagcagttttgaaacactgttttcgtggaatctgcaagtggatatttggctagctttgaggatttcgttggaaacgggattacaaataaaaaggagtcagcagcattctcagaaacttctttgtgatgtctgcattcaagtcacagagttgagcattccctttcatagagcaggttggaaacactctttttgtagtatctggatgaggacatttggagcgctttcaggcctatggtgaaaaaggaaatatcttcccgtaaaaactagacagaagcattctcagaaatttatttgtgatgtgtgccctcaactaacagagttgaacctttcttttgatagagcagttttgaaacactctttttgtaaaatctgcaagaggatatttggatagctttgaggatttccttgcaaacgggaatggcttcatataaactctagacagaagcattctcagaaacttcgttgggatgtttcgattgaagtcccagtgttgaacattcccttttatagagcaggttggaaacactctttctgcattccctggaagtggacatttggagcgctttcaggacgacggtgaaaatggaaatatcttccaagaaaatctagatagaagcaatgtcagaaacttttctgtgatggatctactcagctaacagagttgaaactttcttttgagagagcagttttgcaacactctttttgtggaatatgcaagtggatattagggcagctttgaggatttcgttggaaacgggaatacatgtaaaaagcagacagcagcattctcagaaacttctttgtgatgtttgcattgaagtcacagagttgaacattccctttgagagagcaggtttgaaacacgccttttgtcatatctggaagtgtccattcggagcgcattcaggcttgtgttgtaaaaggaaatatcctcccataaaaactagacagaagcattctcagaaacttatctgtgatgtatgtactcaactaacagaactaaaccatcgttttgaaggagcagttttgaaacactctttttgcggaatctgcaagtggatatttggctagctgggaggatttcgttggaaacgggattacatacaaaaagcagacagcagcattctcagaaacttctttgtgatgtttgcattcaagtcacagagttgaacattccctttcatagagcaggtttgaaacactctttttgtagtatctggatgtggacatttggatcgctttcaggcctatggtgaaaaaggaaatatcttcccatgaaaactagacagaagcattctcagaaacttatttgtgatgtgtgccctcaactgacagtgttgaacctttgttttgatagagcagttctgaaacacactttttgtaaaatctgcaagaggatatttggatagctttgaggatttcgttggaaacgggaatgtcttcatgtaaactctacacagaagcattctcagaaactgctttgggatgtttcaattgaagtcacagtgttgaacattccctttcatagagcaggtttgaaacactctttttgtagtatctggaagtggacatttggagcgctttcaggtctgcggtgaaaaaggagatatcttccaatgaaaactagatagaagcaatgtcagaacttttttcatgatgtatctactcagcaaacagagttgaacctttcttttgagagagcagttttgaaacactctttttgtggaatatgcaagtgggtattaggccagcttggaggatttcgttggaaacgggaatacgtataaaaagcagacagcagcattgtcagaaactactttgtgatgtttgcattcaagtcacagaattgaacactccctttcacagagcaggtttgaaacactctttttgtagtgtctgtaagtgaacatttggattgctttcaggcgtaaggtgaaaaaggaaatatcttcccataaaaactagacagaagcattctcagaaacttgtttgtgatgtgtgccctctactgacagagttgaacctttctttgcaaagagcagttttgaaacactctttttgtagaatctgcaagaggatatttggatagctttgaggatttcttgggaaacgggaatgtcttcagataaactctagacagaagcattctcagaaacttctttgggatgttgcatgcaagtcacagagtagaacattcccattcataaatcagatttgaaacactctttttgtagtatctggaagtggacatttggagcgctttcaggcctatgttgaaaaaggaaatatcttcccataaaaactagacggaagcattctcagaaacttatttgtgatgtgtttgctcaactaacaggattgaaccatcgttttgaaggagcagttttgaaacactgttttcgtggaatctgcaagtggatatttggctagctttgaggatttcgttggaaacgggattacatataaaaaggagacagcagcattctcagaaacttctttgtgatgtctgcattcaattcacagagttgagcattccctttcatagagcaggttggaaacactctttttgtagtatctggatgaggacatttggagcgctttcaggcgtatggtgaaaaaggaaatatcttcccgtaaaaactagacagaagcattctcagaagtttatttgagatgtgtgccctcaactaacagagttgaaactttcttttgatagagcagttttgaaacactctttttgtaaaatctgcaagaggatatttggatagctttgaggatttcgttgcaaacgggaatggcttcatataaactctagacagaagcattctcagaaacttcgttgggatgtttcgattgaagtcccagtgttgaacattcccttttatagagcaggttggaaacactctttctgcattccctggaagtggacatttggagcgctttcaggacgacggtgaaaatggaaatatcttccaagaaaatctagatagaagcaacgtcagaaacttttctgtgatggatctactcagctaacagagttgaacctttcttttgagagagcagttttgcaacactctttttgtggaatatgcaagtggatattagggcagctttgaggatttcgttggaaacgggaatacatgtaaaaagcagacagcagcattctcagaaacttctttgtgatgtttgcattgaagtcacagagttgaacattccctttgagagagcaggtttgaaacacgccttttgtcatatctggaagtgtccattcggagcgcattcaggcttgtgttgaaaaaggaaatatcctcccataaaaactagacagaagcattctcagaaacttatctgtgatgtatgtactcaactaacagaactaaaccatcgttttgaaggagcagttttgaaacactctttttgcggaatctgcaagtggatatttggctagctgggaggatttcgttggaaacgggattacatacaaaaagcagacagcagcattctcagaaacttctttgtgatgtttgcattcaagtcacagagttgaacattccctttcatagagcaggtttgaaacactctttttgtagtatctggatgtggacatttggatcgctttcaggcctatggtgaaaaaggaaatatcttcccatgaaaactagacagaagcattctcagaaacttatttgtgatgtgtgccctcaactgacagtgttgaacctttgttttgatagagcagttctgaaacacactttttgtaaaatctgcaagaggatatttggatagctttgaggatttcgttggaaacgggaatgtcttcatgtaaactctagacagaagcattctcagaaactgctttgggatgtttcaattgaagtcccagtgttgaacattccctttcatagagcaggtttgaaacactctttttgtagtatctggatgaggacatttggagcgctttcaggcgtttggtgaaaaaggaaatatcttcccgtaaaaactagacagaagcaatgtcagaacttttttcatgatgtatctactcagcaaacagagttgaacctttcttttgagagagcagttttgaaacactctttttgtggaatatgcaagtgggtattaggccagcttggaggatttcgttggaaacgggaatacgtataaaaagcagacagcagcattgtcagaaactactttgtgatgtttgcattcaagtcacagaattgaacactccctttcacagagcaggtttgaaacactctttttgtagtgtctgtaagtgaacatttggattgctttcaggcctaaggtgaaaaaggaaatatcttcccataaaaactagacagaagcattctcagaaacttgtttgtgatgtgtgccctctactgacagagttgaacctttctttgcaaagagcagttttgaaacactctttttgtagaatctgcaagaggatatttggatagctttgaggatttcttgggaaacgggaatgtcttcagataaattctagacagaagcattctcagaaacttctttgggatgtttcaattgaagtcacagtgttgaacattccctttcacagagcaggtttgaaacactctttttgtagtgtctataattgaacatttggcgtgctttcaggcctaacgtgaaaaaggaaatatcttcccataaaaactagacagaagcattctcagaaacttgtttgtgatgtgtgccctctactgacagagttgaacctttctttgcaaagagcagctttgaaacactctttttgtagaatctgcaagaggatatgtggatagctttgaggatttcgttggaaacgggtatgtcttcagataaactctagacagaagcattctcagaaacttctttgggatgtttcaattgaagtcacagtgttgaacattccctttcacagagcaggtttgaaacactctttttgtagtgtctataagtgaacatttggcgtgctttcaggcgtaacgtgaaaaaggaaatatcttcccataaaaaccagacagaagcattctcagaaacttgttcatgatgtgtgccctctactgacagagttgaacctttctttgcaaagagcagctttgaaacactctttttgtagaatctgcaagaggatatttggatagctttgaggatttcgttggaaacgggtatgtcttcagataaactctagacagaagcattctcagaaacttctttgggatgttgcattcaagtcacagagtagaacattcccattcatagagcagatttgaaacactctttttgtagtatctggaagtggacatttggagcgctttcaggcctatgttgaaaaaggaaatatcttcccataaaaactagacggaagcattctcagaaacttaattgtgatgtgtttgctcaactaacaggattgaaccatcgttttgaaggagcagttttgaaacactgttttcgtggaatctgcaagtggatatttggctagctttcaggatttcgttggaaacgggattacatataaaaaggagacagcagcattctcagaaacttctttgtgatgtctgcattcaattcacagagttgagcattccctttcatagagcaggttggaaacactctttttgtagtatctggatgaggacatttggagcgctttcaggcgtatggtgaaaagggaaatatcttcccgtaaaaactagacagaagcattctcagaagtttatttgtgatgtgtgccctcaactaacagagttgaacctttcttttgatagagcagttttgaaacactctttttgtaaaatctgcaagaggatatttggatagctttgaggatttcgttgcaaacgggaatggcttcatataaactctagacagaagcattctcagaaacttcgttgggatgtttcgattgaagtcccagtgttgaacattcccttttatagagcaggttggaaacactctttctgcattccctggaagtggacatttggagcgctttcaggacgacggtgaaaatggaaatatcttccaagataatctagatagaagcaatgtcagaaacttttctgtgatggatctactcagctaacagagttgaacctttcttttgagagagcagttttgcaacactctttttgtggaatatgcaagtggatattagggcagctttgaggatttcgttggaaacgggaatacatgtaaaaagcagacagcagcattctcagaaacttctttgtgatgtttgcattgaagtcacagagttgaacattccctttgagagagcaggtttgaaacacgccttttgtcatatctggaagtgtccattcggagcgcattcaggcttgtgttgaaaaaggaaatatcctcccataaaaactagacagaagcattctcagaaacttatctgtgatgtatgtactcaactaaccgaactaaaccatcgttttgaaggagcagttttgaaacactctttttgcggaatctgcaagtggatatttggctagctgggaggatttcgttggaaacgggattacatacaaaaagcagacagcagcattctcagaaacttatttgtgatgtgtgcactcaactgacagtgttgaacctttgttttgatagagcagttctgaaacacactttttgtaaaatctgcaagaggatatttggatagctttgaggatttcgttggaaacgggaatgtcttcatgtaaactctagacagaagcattctcagaaactgctttgggatgtttcaattgaagtcccagtgttgaacattcccattcatagagcaggtttgaaacactctttttctactatctggaagtggacatttggagcgctttcaggtttacggtgaaaaaggagatatcttccaataaaaactagatagaagcaatgtcagaacttttttcatgatgtatctactcagcaaacagagttgaacctttcttttgagagagcagttttgacacagtctttgtggaatatgcaagtgggtattaggccagcttggaggatttcgttggaaacgggaatacgtataaaaagcagacagcagcattgtcagaaactactttgtgatgtttgcattcaagtcacagaattgaacactccctttcacagagcaggtttgaaacactctttttgtagtgtctgtaagtgaacatttggattgctttcaggcctatggtgaaaaaggaaatatcttcccataaaaactagacagaagcattctcagaaacttgtttgtgatgtgtgccctctactgacagagttgaacctttctttgcaaagagcagttttgaaacactctttttgtagaatctgcaagaggatatttggatagctttgaggatttcttgggaaacgggaatgtcttcagataaactctagacagaagcattctcagaaacttctttgggatgtttcaattgaagtcacagtgttgaacattccctttcacagagcaggtttgaaacactctttttgtagtgtctataattgaacatttggcgtgctttcaggcctaacgtgaaaaaggaaatatcttcccataaaaactagacagaagcattctcagaaacttgttcgtgatgtgtgccctctactgacagagttgaacctttctttgcaaagagcagctttgaaacactctttttgtagaatctgcaagaggatatttggatagctttgaggatttcgttggaaacgggtatgtcttcagataaactctagacagaagcattctcagaaacttctttgggatgttgcattcaagtcacagagtagaacattcccattcatagagtagatttgaaacactctttttgtagtatctggaagtggacatttggagcgctttcaggcctatgttgaaaaaggaaatatcttcccataaaaactagacggaagcattctcagaaacttacttgtgatgtgtttgctcaactaacagaattgaaccatcgttttgaaggagcagttttgaaacactgttttcgtggaatctgcaagtggatatttggctagctttgaggatttcgttggaaacgggattacatataaaaaggagacagcagcattctcagaaagttctttgtgatgtctgcattcaattcacagagttgagcattccctttcatagagcaggttggaaacactctttttgtagtatctggatgaggacatttggagcgctttcaggcctatggtgaaaaaggaaatatcttcccgtaaaaactagacagaagcattctcagaaatttatttgtgatgtgtgccctcaactaacagagttgaacctttcttttgatagagcagttgtgaaacactctttttgtaaaatctgcaagaggatatttggatagctttgaggatttcattgcaaacgggaatggcttcatataaactctagacagaagcattctcagaaacttcgttgggatgtttcgattgaagtcccagtgttgaacattcccttttatagagcaggttggaaacactctttctgcattccctggaagtggacatttggagcgctttcaggacgacggtgaaaatggaaatatcttccaagaaaatctagatagaagcaatgtcagaaacttttatgtgatggatctactcagctaacagagttgaagctttcttttgagagagcagttttgcaacattctttttgtggaatatgcaagtggatattagggcagctttgaggatttcgttggaaacgggaatacatgtaaaaagcagacagcagcattctcagaaacttgtttgtgatgtttgcattgaagtcacagagttgaacattccctttgagagagcaggtttgaaacacgccttttgtcatatctggaagtgtccattcggagcgcattcaggcttgtgttgaaaaaggaaatatcctcccataaaaactagacagaagcattctcagaaacttatctgtgatgtatgtactcaactaacagaactaaaccatcgttttgaaggagcagttttgaaacactctttttgcggaatctgcaagtggatatttggctagctgggaggatttcgttggaaacgggattacatacaaaaagcagacagcagcattctcagaaacttctttgtgatgtttgcattcaagtcacagagttgaacattccctttcatagagcaggtttgaaacactctttttgtagtatctggatgtggacatttggatcgctttcaggcctatggtgaaaaaggaaatatcttcccatgaaaactagacagaagcattctcagaaacttatttgtgatgtgtgccctcaactgacagtgttgaacctttgttttgatagagcagttctgaaacacactttttgtaaaatctgcaagaggatatttggatagctttgaggatttcgttggaaacgggaatgtcttcatgtaaactctacacagaagcattctcagaaactgctttgggatgtttcaattgaagtcccagtgttgaacattcccattcatagagcaggtttgaaacactctttttgtactatctggaagtggacatttggagcgctttcaggtctacggtgaaaaaggagatatcttccaataaaaactagatagaagcaatgtcagaactttttcatgatgtatctactcagctaacagagttgaacctttcttttgagagagcagttttgaaacactctttttgtggaatatgcaagtgggtattaggccagcttggaggatttcgttggaaacgggaatacgtataaaaagcagacagcagcattgtcagaaactactttgtgatgtttgcattcaagtcacagaattgaacactccctttcacagagcaggtttgaaacactctttttgtagtgtctgtaagtgaacatatggattgctttcaggcctaaggtgaaaaaggaaatatcttcccataaaaactagacagaagcattctcagaaacttgtttgtgatgtgtgccctctactgacagagttgaacctttctttgcaaagagcagttttgaaacactctttttgtagaatctgcaagaggatatttggatagctttgaagatttcttgggaaacgggaatgtcttcagataaactctagacagaagcattctcagaaacttctttgggatgtttcaattgaagtcacagtgttgaacattccctttcacagagcaggtttgaaacactctttttgtagtgtctataagtgaacatttggcgtgctttcaggcctaacgtgaaaaaggaaatatcttcccataaaaactagacagaagcattctcagaaacttgttcatgatgtgtgccctctactgacagagttgaacctttctttgcaaagagcagctttgaaacactctttttgtagaatctgcaagaggatatttggatagcttggaggatttcgttggaaacgggtatgtcttcagataaactctagacagaagcattctcagaaacttctttgggatgttgcattcaagtcacagagtagaacattcccattcatagagcagatttgaaacactctttttgtagtatctggaagtggacatttggagcgctttcaggcctatgttgaaaaaggaaatatcttcccataaaaactagacggaagcattctcagaaacttatttgtgatgtgtttgctcaactaacaggattgaaccatcgttttgaaggagcagttttgaaacactgttttcgtggaatctgcaagtggatatttggctagctttgaggatttcgttggaaacgggattacatataaaaaggagacagcagcattctcagaaacttctttgtgatgtctgcattcaattcacagagttgagcattccctttcatagagcacgttggaaacactctttttgtagtatctggatgaggacatttggagcgctttcaggcctatggtgaaaaaggaaatatcttcccgtaaaaactagacagaagcattctcagaagtttatttgtgatgtgtgccctcaactaacagagttgaacctttcttttgatagagcagttttgaaacactctttttgtaaaatctgcaagaggatatttggatagctttgaggatttcgttgcaaacgggaatggcttcatataaactctagacagaagcattctcagaaacttcgttgggatgtttcgattgaagtcccagtgttgaacattcccttttatagagcaggttggaaacactctttctgcattccctggaagtggacattttgagcgctttcaggacgacggtgaaaatggaaatatcttccaagaaaatctagatagaagcaatgtcagaaacttttatgtgatggatctactcagctaacagagttgaacctttcttttgagagagcagttttgcaacactctttttgtggaatatgcaagtggatattagggcagctttgaggatttcgttggaaacgggaatacatgtaaaaagcagacagcagcattctcagaaacttctttgtgatgtttgcattgaagtcacagagttgaacattccctttgagagagcaggtttgaaacacgccttttgtcatatctggaagtgtccattcggagcgcattcaggcttgtgttgaaaaaggatatatcctcccataaaaactagacagaagcattctcagaaacttatctgtgatgtatgtactcaactaacagaactaaaccatcgttttgaaggagcagttttgaaacactctttttgcggaatctgcaagtggatatttggctagctgggaggatttcgttggaaacgggattacatacaaaaagcagacagcagcattctcagaaacttctttgtgatgtttgcattcaagtcacagagttgaacattccctttcatagagcaggtttgaaacactctttttgtagtatctggatgtggacatttggatcgctttcaggcctatggtgaaaaaggaaatatcttcccatgaaaactagacagaagcattctcagaaacttatttgtgatgtgtgccctcaactgacagtgttgaacctttgttttgatagagcagttctgaaacacactttttgtaaaatctgcaagaggatatttggatagctttgaggatttcgttggaaacgggaatgtcttcatgtaaactctacacagaagcattctcagaaactgctttgggatgtttcaattgaagtcccagcgttgaacattcccattcatagagcaggtttgaaacactctttttgtactatctggaagtggacatttggagcgctttcaggtctacggtgaaaaaggagatatcttccaataaaaactagatagaagcaatgtcagaacttttttcatgatgtatctactcagcaaacagagttgaacctttcttttgagagagcagttttgacacagtctttgtggaatatgcaagtgggtattaggccagcttggaggatttcgttggaaacgggaatacgtataaaaagcagacagcagcattgtcagaaactactttgtgatgtttgcattcaagtcacagaattgaacactccctttcacagagcaggtttgaaacactctttttgtagtgtctgtaagtgaacatttggattgctttcaggcctatggtgaaaaaggtaatatcttcccataaaaactagacagaagcattctcagaaacttgtttgtgatgtgtgccctctactgacagagttgaacctttctttgcaaagagcagttttgaaacactctttttgtagaatctgcacgaggatatttggatagctttgaggatttcttgggaaacgggaatgtcttcagataaactctagacagaagcattctcagaaacttctttgggatgtttcaattgaagtcacagtgttgaacattccctttcacagagcaggtttgaaacactctttttgtagtgtctataagtgaacatttggcgtgctttcaggcctaacgtgaaaaaggaaatatcttcccataaaaactagacagaagcattctcagaaacttgttcgtgatgtgtgccctctactgacagagttgaacctttctttgcaaagagcagctttgaaacactctttttgtagaatctgcaagaggatatttggatagcttggaggatttcgttggaaacgggtatgtcttcagataaactctagacagaagcattctcagaaacttctttgggatgttgcattcaagtcacagagtagaacattcccattcatagagcagatttgaaacactctttttgtagtatctggaagtggacatttggagcgctttcaggcctatgttgaaaaaggaaatatcttcccataaaaactagacggaagcattctcagaaacttacttgtgatgtgtttgctcaactaacagaattgaaccatcgttttgaaggagcagttttgaaacactgttttcgtggaatctgcaagtggatatttggctagctttgaggatttcgttggaaacgggattacatatacaaaggagacagcagcattctcagaaacttctttgtgatgtctgcattcaattcacagagttgagcattccctttcatagagcacgttggaaacactctttttgtagtatctggatgaggacatttggagcgctttcaggcgtatggtgaaaaaggaaatatcttcccgtaaaaactagacagaagcattctcagaaatttatttgtgatgtgtgccctcaactaacagagttgaacctttcttttgatagagcagttttgaaacactctttttgtaaaatctgcaagaggatatttggatagctttgaggatttcgttgcaaacgggaatggcttcatataaactctagacagaagcattctcagaaacttcgttgggatgtttcgattgaagtcccagtgttgaacattcccttttatagagcaggttggaaacactctttctgcattccctggaagtggacatttggagcgctttcaggacgacggtgaaaatggaaatatcttctaataaaatctagatagaagcaatgtcagaaacgtttatgtgatggatctactcagctaacagagttgaacctttcttttgagagagcagttttgcaacactctttttgtggaatatgcaagtggatattagggcagctttgaggatttcgttggaaacgggaatacatgtaaaaagcagacagcgcattctcagtaaacttctttgtgatgtttgcattgaagtcacagagttgaacattccctttgagagagcaggattgaaacacgccttttgtcatatctggaagtgtccattcggagcgcattcaggcttgtgttgaaaaaggaaatatcctcccataaaaagtatacagaagcattctcagaaacttatttgtgatgtatgtactcaactaacagaactaaaccatcgttttgacggagcagttttgaaacactctttttgcggaatctgcaagtggatatttggctagctgggaggatttcgttggaaacgggattacatacaaaaagcagagagcagcattctcagaaacttatttgtgatgtgtgccctcaactgacagtgttgaacctttgttttgatagagcagttctgaaacacactttttgtaaaatctgcaagaggatatttggatagctttgaggatttcgttggaaacgggaatgtcttcatgtaaactctagacagaagcattctcagaaactgctttgggatgtttcaattgaagtcccagtgttgaacattccctttcatagagcaggtttgaaacactctttttgtagtatctggatgaggacatttggagcgctttcaggcgtttggtgaaaaaggaaatatcttcccgtaaaaactagacagaagcaatgtcagaacttttttcatgatgtatctactcagcaaacagagttgaacctttcttttgagagagcagttttgaaacactctttttgtggaatatgcaagtgggtattaggccagcttggaggatttcgttggaaacgggaatacgtataaaaagcagacagcagcattgtcagaaactactttgtgatgtttgcattcaagtcacagaattgaacactccctttcacagagcaggtttgaaacactctttttgtagtgtctgtaagtgaacatatggattgctttcaggcctaaggtgaaaaaggaaatatcttcccataaaaactagacagaagcattctcagaaacttgtttgtgatgtgtgccctctactgacagagttgaacctttctttgcaaagaccagttttgaaacactctttttgtagaatctgcaagaggatatttggatagctttgaggatttcttgggaaacgggaatgtcttcagataaactctagacagaagcattctcagaaacttctttgggatatttcaattgaagtcacagtgttgaacattccctttcacagagcaggtttgaaacactctttttgtagtgtctataagtgaacatttggcgtgctttcaggcgtaacgtgaaaaaggaaatatcttcccataaaaactagacagaagcattctcagaaacttgttcgtgatgtgtgccctctactgacagagttgaacctttctttgcaaagagcagctttgaaacactctttttgtagaatctgcaagaggatatttggatagcttggaggatttcgttggaaacgggtatgtcttcagataaactatagacagaagcattctcagaaacttctttgggatgttgcattcaagtcacagagtagaacattcccattcatagagcagatttgaaacactctttttgtagtatctggaagtggacatttggagcgctttcaggcctatgttgaaaaaggaaatatcttcccataaaaactagacggaagcattctcagaaacttatttgtgatgtgcttgctcaactaacaggattgaaccatcgttttgaaggagcagttttgaaacactgttttcatggaatctgcaagtggatatttggctagctttgaggatttcgttggaaacgggattacatataaaaaggagacagcagcattctcagaaacttctttgtgatgtttgcattcaagtcacagagttgaacattccctttcatagagcaggtttgaaacactctttttgtagtatctggatgtggacatttggatcgctttcaggcctatggtgaaaaaggaaatatcttcccatgaaaactagacagaagcattctcagaaacttatttgtgatgtgtgccctcaactgacagtgttgaacctttgttttgatagagcagttctgaaacacactttttgtaaaatctgcaagaggatatttggatagctttgaggatttcgttggaaacgggaatgtcttcatgtaaactctagacagaagcattctcagaaactgctttgggatgtttcaattgaagtcccagtgttgaacattcccattcatagagcaggtttgaaacactctttttgtactatctggaagtggacatttggagcgctttcaggtctacggtgaaaaaggagatatcttccaataaaaactagatagaagcaatgtcagaacttttttcatgatgtatctactcagcaaacagagttgaacctttcttttgagagagcagttttgaaacactctttttgtggaatatgcaagtgggtattaggccagcttggaggatttcgttggaaacgggaatacgtataaaaagcagacagcagcattgtcagaaactactttgtgatgtttgcattcaagtcacagaattgaacactccctttcacagagcaggtttgaaacactctttttgtagtgtctgtaagtgaacatttggattgcttcaggcctaaggtgaaaaaggaaatatcttcccataaaaactagacagaagcattctcagaaacttgtttgtgatgtgtgccctctactgacagagttgaacctttctttgcaaagagcagttttgaaacactctttttgtagaatctgcaagaggatatttggatagctttgaggatttcttgggaaacgggaatgtcttcagataaactctagacagaagcattctcagaaacttctttgggatgtttcaattgaagtcacagtgttgaacattccctttcacagagcaggtttgaaacactctttttgtagtgtctataagtgaacatttggcgtgctttcaggcctaacgtgaaaaaggaaatatcttcccataaaaactagacagaagcattctcagaaacttgttcgtgatgtgtgccctctactgacagagttgaacctttctttgcaaagagcagctttgaaacactctttctgtagaatctacaagaggatatttggatagcttggaggatttccttggaaacgggtatgtcttcagataaactctagacagaagcattctcagaaacttctttgggatgttgcattcaagtcacagagtagaacattcccattcatagagcagatttgaaacactctttttgtagtatctggaagtggacatttggagcgctttcaggcctatgttgaaaaaggaaatatcttcccataaaaactagacggaagcattctcagaaacttatttgtgatgtgtttgctcaactaacaggattgaaccatcgttttgaaggagcagttttgaaacactgttttcgtggaatctgcaagtggatatttggctagctttgaggatttcgttggaaacgggattacatataaaaaggagacagcagcattctcagaaacttctttgtgatgtctgcattcaattcacagagttgagcattccctttcatagagcaggttggaaacactctttttgtagtatctggatgaggacatttggagcgctttcaggcgtatggtgaaaaaggaaatatcttcccgtaaaaactagacagaagcattctcagaagtttatttgtgatgtgtgccctcaactaacagagttgaacctttcttttgatagagcagttttgaaacactctttttgtaaaatctgcaagaggatatttggatagctttgaggatttcgttgcaaacgggaatggcttcatataaactctagacagaagcattctcagaaacttcgttgggatgtttcgattgaagtcccagtgttgaacattcccttttatagagcaggttggaaacactctttctgcattccctggaagtggacatttggagcgctttcaggacgacggtgaaaatggaaatatcttccaagaaaatctagatagaagcaacgtcagaaacttttctgtgatggatctactcagctaacagagttgaacctttcttttgagagagcagttttgcaacactctttttgtggaatatgcaagtggatattagggcagctttgaggatttcgttggaaacgggaatacatgtaaaaagcagacagcagcattctcagaaacttctttgtgatgtttgcattgaagtcacagagttgaacattccctttgagagagcaggtttgaaacacgccttttgtcatatctggaagtgtccattcggagcgcattcaggcttgtgttgaaaaaggaaatatcctcccataaaaactagacagaagcattctcagaaacttatctgtgatgtatgtactcaactaacagaactaaaccatcgttttgaaggagcagttttgaaacactctttttgcggaatctgcaagtggatatttggctagctgggaggatttcgttggaaacgggattacatacaaaaagcagacagcagcattctcagaaacttctttgtgatgtttgcattcaagtcacagagttgaacattccctttcatagagcaggtttgaaacactctttttgtagtatctggatgtggacatttggatcgctttcaggcctatggtgaaaaaggaaatatcttcccatgaaaactagacagaagcattctcagaaacttatttgtgatgtgtgccctcaactgacagtgttgaacctttgttttgatagagcagttctgaaacacactttttgtaaaatctgcaagaggatatttggatagctttgaggatttcgttggaaacgggaatgtcttcatgtaaactctacacagaagcattctcagaaactgctttgggatgtttcaattgaagtcctagtgttgaacattcccattcatagagcaggtttgaaacactctttttgtactatctggaagtggacatttggagcgctttcaggtctacggtgaaaaaggagatatcttccaataaaaactagatagaagcaatgtcagaacttttttcatgatgtatctactcagcaaacagagttgaacctttcttttgagagagcagttttgaaacactctttttgtggaatatgcaagtgggtattaggccagcttggaggatttcgttggaaacgggaatacgtataaaaagcagacagcagcattgtcagaaactactttgtgatgtttgcattcaagtcacagaattgaacactccctttcacagagcaggtttgaaacactctttttgtagtgtctgtaagtgaacatttggattgctttcaggcctaaggtgaaaaaagaaatatcttcccataaaaactagacagaagcattctcagaaacttgtttgtgatgtgtgccctctactgacagagttgaacctttctttgcaaagagcagttttgaaacactctttttgtagaatctgcaagaggatatttggatagctttgaggatttcttgggaaacgggaatgtcctcagataaactctagacagaagcattctcagaaacttctttgggatgtttcaattgaagtcacagtgttgaacattccctttcacagagcaggtttgaaacactctttttgtagtgtctataagtgaacatttggcgtgctttcaggcctaacgtgaaaaaggaaatatcttcccataaacactagacagaagcattctcagaaacttgttcgtgatgtgtgccctctactgacagagttgaacctttctttgcaaagagcagctttgaaacactctttttgtagaatctgcaagaggatatttggatagctttgaggatttcgttggaaacgggtatgtcttcagataaactctagacagaagcattctcagaaacttctttgggatgttgcattcaagtcacagagtagaacattcccattcatagagcagatttgaaacactctttttgtagtatctggaagtggacatttggagcgctttcaggcctatgttgaaaaaggatatatcttcccataaaaactagacggaagcattctcagaaacttacttgtgatgtgtttgctcaactaacagaattgaaccatcgttttgaaggagcagttttgaaacactgttttcgtggaatctgcaagtggatatttggctagctttgaggatttcgttggaaacgggattacatataaaaaggagacagcagcattctgagaaacttctttgtgatgtctgcattcaagtcacagagttgagcattccctttcatagagcaggttggaaacactctttttgtagtatctggatgaggacatttggagcgctttcaggcgtatggtgaaaaaggaaatatcttcccgtaaaaactagacagaagcattctcagaaatttatttgtgatgtgtgccctcaactaacagagttgaacctttcttttgatagagcagttttgaaacactctttttgtaaaatctgcaagaggatatttggatagctttgaggatttcattgcaaacgggaatggcttcatataaactctagacagaagcattctcagaaacttcgttgggatgtttcgattgaagtcccagtgttgaacattcccttttatagagcaggttggaaacactctttttgcattccctggaagtggacatttggagcgctttcaggacgacggtgaaaatggaaatatcttccaataaaatctagatagaagcaatgtcagaaacttttctgtgatggatctactcagctaacagagttgaacctttcttttgagagagcagttttgcaacactctttttgtggaatatgcaagtggatattagggcagctttgaggatttcgttggaaacgggaatacatgtaaaaagcacacagcagcattctcagaaacttctttgtgatgtttgcattgaagtcacagagttgaacattccctttgagagagcaggtttgaaacacgccttttgtcatatctggaagtgtccattcggagcgcattcaggcttgtgttgaaaaaggaaatatcctcccagaaaaactagacagaagcattctcagaaacttatctgtgatgtatgtactcaactaacagaactaaaccatcgttttgaaggagcagttttgaaacactctttttgcggaatctgcaagtggatatttggctagctgggaggatttcgttggaaacgggattacatacaaaaagcagacagcagcattctcagaaacttctttgtgatgtttgcattcaagtcacagagttgaacattccctttcatagagcaggtttgaaacactctttttgtagtatctggatgtggacatttggatcgctttcaggcctatggtgaaaaaggaaatatcttcccatgaaaactagacagaagcattctcagaaacttatttgtgatgtgtgccctcaactgacagtgttgaacctttgttttgatagagcagttctgaaacacactttttgtaaaatctgcaagaggatatttggatagctttgaggatttcgttggaaacgggaatgtcttcatgtaaactctagacagaagcattctcagaaactgctttgggatgtttcaattgaagtcccagtgttgaacattccctttcatagagcaggtttgaaacactctttttgtactatctggaagtggacatttggagcgctttcaggtctacggtgaaaaaggagatatcttccaataaaaactagatagaagcaatgtcagaacttttttcatgatgtatctactcagcaaacagagttgaacctttcttttgagggagcagttttgaaacactatttttgtggaatatgcaagtgggtattaggccagcttggaggatttcgttggaaacgggaatacgtataaaaagcagacagcagcattgtcagaaactactttgtgatgtttgcattcaagtcacagaattgaacactccctttcacagagcaggtttgaaacactctttttgtagtgtctgtaagtgaacatttggattgctttcaggcctaaggtgaaaaaggaaatatcttcccataaaaactagacagaagcattctcagaaacttgtttgtgatgtgtgccctctactgacagagttgaacctttctttgcaaagagcagttttgaaacactctttttgtagaatctgcaagaggatatttggatagctttgaggatttcttgggaaacgggaatgtcttcagataaactctagacagaagcattctcagaaacttctttgggatgtttcaattgaagtcacagtgttgaacattccctttcacagagcaggtttgaaacactctttttgtagtgtctataagtgaacatttggcgtgctttcaggcctaacgtgaaaaaggaaatatcttcccataaaaactagacagaagcattctcagaaacttgttcgtgatgtgtgccctctactgacagagttgaacctttctttgcaaagagcagctttgaaacacactttttgtagaatctgcaagaggatatttggatagctttgaggatttcgttggaaacgggtatgtcttcagataaactctagacagaagcattctcagaaacttctttgggatgttgcattcaagtcacagagtagaacattcccattcatagagcagatttgaaacactctttttgtagtatctggaagtggacatttggagcgctttcaggcctatgttgaaaaaggaaatatcttcccataaaaactagacggaagcattctcagaaacttatttgtgatgtgtttgctcaactaacaggattgaaccatcgttttgaaggagcagttttgaaacactgttttcgtggaatctgcaagtggatatttggctagctttgaggatttcgttggaaatgggattacatataaaaaggagacagcagcattctcagaaacttctttgtgatgtctgcattcaattcacagagttgagcattccctttcatagagcaggtttgaaacactctttttgtagtatctggatgtggacatttggatcgctttcaggcctatggtgaaaaaggaaatatcttcccatgaaaactagacagaagtattctcagaagtttatttgtgatgtgtgccctcaactaacagagttgaacctgtcttttgatagagcagttttgaaacactctttttgtaaaatctgcaagaggatatttggatagctttgaggatttcgttgcaaacgggaatggcttcatataaactctagacagaagcattctcagaaacttcgttgggatgtttcgattgaagtcccagtgttgaacattcccttttatagagcaggttggaaacactctttctgcattccctggaagtggacatttggagcgctttcaggacgacggtgaaaatggaaatatcttccaagaaaatctagatagaagcaatgtcagaaacttttatgtgatggatctactcagctaacagagttgaacctttcttttgagagagcagttttgcaacactctttttgtggaatatgcaagtggatattagggcagctttgaggatttcgttggaaacgggaatacatgtaaaaagcagacagcaccattctcagaaacttctttgtgatgtttgcattgaagtcacagagttgaacattccctttgagagagcaggtttgaaacacgccttttgtcatatctggaagtgtccattcggagcgcattcaggcttgtgttgaaaaaggaaatatcctcccataaaaactagacagaagcattctcagaaacttatctgtgatgtatgtactcaactaacagaactaaaccatcgttttgaaggagcagttttgaaacactctttttgcggaatctgcaagtggatatttggctagctgggaggatttcgttggaaacgggattacatacaaaaagcagacagcagcattctcagaaacttctttgtgatgtttgcattcaagtcacagagttgaacattccctttcatagagcaggtttgaaacactctttttgtagtatctggatgtggacatttggatcgctttcaggcctatggtgaaaaaggaaatatcttcccatgaaaactagacagaagcattctcagaaacttatttgtgatgtgtgccctcaactgacagtgttgaacctttgttttgatagagcagttctgaaacacactttttgtaaaatctgcaagaggatatttgcatagctttgaggatttcgttggaaacgggaatgtcttcatgtaaactctagacagaagcattctcagaaactgctttgggatgtttcaattgaagtcccagtgttgaacattccctttcatagagcaggtttgaaacactctttttgtactatctggaagtggacatttggagcgctttcaggtctacggtgaaaaaggagatatcttccaataaaaactagatagaagcaatgtcagaacttttttcatgatgtatctactcagcaaacagagttgaacctttcttttgagagagcagttttgacactgtctttgtggaatatgcaagtgggtattaggccagcttggaggatttcgttggaaacgggaatacgtataaaaagcagacagcagcattgtcagaaactactttgtgatgtttgcattcaagtcacagaattgaacactccctttcacagagcaggtttgaaacactctttttgtagtgtctgtaagtgaacatatggattgctttcaggcctaaggtgaaaaaggaaatatcttcccataaaaactagacagaagcattctcagaaacttgtttgtgatgtgtgccctctactgacagagttgaacctttctttgcaaagagcagttttgaaacacactttttgtagaatctgcaagaggatatttggatagctttgaggatttcttgggaaacgggaatgtcttcagataaactctagaaagaagcattctcagaaacttctttgggatgtttcaattgaagtcacagtgttgaacattccctttcacagagcaggtttgaaacactctttttgtagtgtctataagtgaacatttggcgtgctttcaggcctaacgtgaaaaaggaaatatcttcccataaaaactagacagaagcattctcagaaacttgtttgtgatgtgtgccctctactgacagagttgaacctttctttgcaaagagcagctttggaacactctttttgtagaatctgcaagaggatatttggatagctttgaggatttcgttggaaacgggtatgtcttcagataaactctagacagaagcattcccagaaacttctttgggatgttgcattcaagtcacagagtagaacattcccattcatagagcagatttgaaacactctttttgtagtatctggaagtggacatttggagcgctttcaggcctatgttgaaaaaggaaatatcttcccataaaaactagacggaagcattctcagaaacttatttgtgatgtgtttgctcaactaacaggattgaaccatcgttttgaaggagcagttttgaaacactgttttcgtggaatctgcaagtggatatttggctagctttgaggatttcgttggaaacgggattacatataaaaaggagacagcagcattctcagaaacttctttgtgatgtctgcattcaattcacagagttgagcattccctttcatagagcaggttggaaacactctttttgtagtatctggatgtggacatttggatcgctttcaggcctatggtgaaaaaggaaatatcttcccatgaaaactagacagaagcattctcagaaacttatttgtgatgtgtgccctcaactgacagtgttgaacctttgttttgatagagcagttctgaaacacactttttgtaaaatctgcaagaggatatttggatagctttgaggatttcgttggaaacgggaatgtcttcatgtaaactctggacagaagcattctcagaaactgctttgggatgtttcaattgaagtcccagtgttgaacattcccattcatagagcaggtttgaaacactctttttgtactatctggaagtggacatttggagcgctttcaggtctacggtgaaaaaggagatatcttccaataaaaactagatagaagcaatgtcagaacttttttcatgatgtatctactcagctaacagtagttgaacctttcttttgagagagcagttttgaaacactctttgtgtggaatatgcaagtgggtattaggccagcttggaggatttcgttggaaacgggaatacgtataaaaagcagacagcagcattgtgagaaactactttgtgatgtttgcattcaagtcacagaattgaacactccctttcacagagcaggtttgaaacactctttttgtagtgtctgtaagtgaacatttgcattgctttcaggcctaaggtgaaaaaggaaatatcttcccataaaaactagacagaagcattctcagaaacttgtttgtgatgtgtgccctctactgacagagttgaacctttctttgcaaagagcagttttgaaacactctttttgtagaatctgcaagaggatatttggatagctttgaggatttcttgggaaacgggaatgtcttcagataaactctagacagaagcattctcagaaacttctttgggatgtttcaattgaagtcacagtgttgaacattccctttcacagagcaggtttcaaacactctttttgtagtgtctataagtgaacatttggcgtgctttcaggcctaacgtgaaaaaggaaatatcttcccataaaaactagacagaagtattctcagaaacttgttcgtgatgtgtgccctctactgacagagttgaacctttctttgcaaagagcagctttgaaacacactttttgtagaatctgcaagaggatatttggatagctttgaggatttcgttgcaaacgggattacatataaaaaggagacagcagcattctcagaaacttctttgtgatgtctgcattcaattcacagagttgagcattccctttcatagagcaggttggaaacactctttttgtagtatctggatgaggacatttggagcgctttcaggcgtatggtgaaaaaggaaatatcttcccgtaaaaactagacagaagcattctcagaagtttatttgtgatgtgtgccctcaactaacagagttgaaactttcttttgatagagcagttttgaaacactcattttgtaaaatctgcaagaggatatttggatagctttgaggatttcgttgcaaacgggaatggcttcatataaactctagacagaaagcattctcagaaacttcgtcgggatgtttcgattgaagtcccagtgttgaacattcccttttatagagcaggttggaaacactctttctgcattccctggaagtggacaattggagcgctttcaggacgacggtgaaaatggaaatatcttccaataaaatctggatagagcaacgtcagaaacttttctgtgatggatctactcagctaacagagttgaacctttcttttgagagagcagtttcgcaacactctttttgtggaatatgcaagtggatattagggcagctttgaggatttcgttggaaacgggaatacatgtaaaaagcagacagcaagcattctcagaaacttctttgtgatgtttgcattgaagtcacagagttgaacattccctttgagagagcaggtttgaaacacgccttttgtcatatctggaagtgtccattcggagcgcattcaggcttgtgttgaaaaaggaaaatatcctcccataaaaactagacagaagcattctcagaaacttatctgtgatgtatgtactcaactaacagaactaaaccatcgttttgaaggagcagttttgaaacactctttttgcggaatctgcaagtggatatttggctagctgggaggatttcgttggaaacgggattacatacaaaaagcagacagcagcattctcagaaacttctttgtgatgtttgcattcaagtcacagagttgaacattccctttcatagagcaggtttgaaacactctttttgtagtatctggatgtggacatttggatcgctttcaggcctatggtgaaaaaggaaatatcttcccatgaaaactagacagaagcattctcagaaacttatttgtgatgtgtgccctcaactgacagtgttgaacctttgttttgatagagcagttctgaaacacactttttgtaaaatctgcaagaggatatttggatagctttgaggatttcgttggaaacgggaatgtcttcatgtaaactctacacagaagcattctcagaaactgctttgggatgtttcaattgaagtcccagtgttgaacattcccattcatagagcaggtttgaaacactctttttgtactatctggaagtggacatttggagcgctttcaggtctacagtgaaaaaggagatatcttccaataaaaactagatagaagcaatgtcagaacttttttcatgatgtatctactcagctaacagagttgaacctttcttttgagagagcagttttgaaacactctttttgtggaatatgcaagtgggtattaggccagcttggaggatttcgttggaaacgggaatacgtataaaaagcagacagcagcattgtcagaaactactttgtgatgtttgcattcaagtcacagaattgaacactccctttcacagagcaggtttgaaacactctttttgtagtgtctgtaagtgaacatatggattgctttcaggcctaaggtgaaaaaggaaatatcttcccataaaaactagacagaagcattctcagaaacttctttgggatgtttcaattgaagtcacagtgttgaacattccctttcacagagcaggtttgaaacactctttttgtagtgtctataagtgaacatttggcgtgctttcaggcctaacgtgaaaaaggaaatatcttcccataacaactagacagaagcattctcagaaacttgttcatgatgtgtgccctctactgacagagttgaacctttctttgcaaagagcagctttgaaacactctttttgtagaatctgcaagaggatatttggatagcttggaggatttcgttggaaacgggtatgtcttcagataaactctagacagaagcattctcagaaacttctttgggatgttgcattcaagtcacagagtagaacattcccattcatagagcagatttgaaacactctttttgtagtatctggaagtggacatttggagcgctttcaggcctatgttgaaaaaggaaatatcttcccataaaaactagacggaagcattctcagaaacttatttgtgatgtgtttgctcaactaacaggattgaaccatcgttttgaaggagcagttttgaaacactgttttcgtggaatctgcaagtggatatttggctagctttgaggatttcgttggaaacgggattacatatacaaaggagacagcagcattctcagaaacttctttgtgatgtctgcattcaattcacagagttgagcattccctttcatagagcaggttggaaacactctttttgtagtatctggatgaggacatttggagcgctttcaggcgtatggtgaaaaaggaaatatcttcccgtaaaaactagacagaagcattctcagaagtttatttgtgatgtgtgccctcaactaacagagttgaacctttcttttgatagagcagttttgaaacactctttttgtaaaatctgcaagacgatatttggatagctttgaggatttcgttgcaaacgggaatggcttcatataaactctagacagaagcattctcagaaacttcgttgggatgtttcgattgaagtcccagtgttgaacattcccttttatagagcaggttggaaacactctttctgcattccctggaagtggacatttggagcgctttcaggacgacggtgaaaatggaaatatcttccaagaaaatctagatagaagcaatgtcagaaacttttatgtgatggatctactcagctaacagagttgaacctttcttttgagagagcagttttgcaacactctttttgtggaatatgcaagtggatattagggcagctttgaggatttcgttggaaacgggaatacatgtaaaaagcagacagcagcattctcagaaacttctttgtgatgtttgcattgaagtcacagagttgaacattccctttgagagagcaggtttgaaacacgccttttgtcatatctggaagtgtccattcggagcgcattcaggcttgtgttgaaaaaggaaatatcctcccataaaaactagacagaagcattctcagaaacttatctgtgatgtatgtactcaactaacagaactaaaccatcgttttgaaggagcaattttgaaacactctttttgcggaatctgcaagtggatatttgcctagctgggaggatttcgttggaaacgggattacatacaaaaagcagacagcagcattctcagaaacttctttgtgatgtttgcattcaagtcacagagttgaacattccctttcatagagcaggtttgaaacactctttttgtagtatctggatgtggacatttggatcgctttcaggcctatggtgaaaaaggaaatatcttcccatgaaaactagacagaagcattctcagaaacttatttgtgatgtgtgccctcaactgacagtgttgaacctttgttttgatagagcagttctgaaacacactttttgtaaaatctgcaagaggatatttggatagctttgaggatttcgttggaaacgggaatgtcttcatgtaaactctagacagaagcattctcagaaactgctttgggatgtttcaattgaagtcccagtgttgaacattcccattcatagagcaggtttgaaacactctttttgtactatctggaagtggacatttggagcgctttcaggtctacggtgaaaaaggagatatcttccaataaaaactagatagaagcaatgtcagaacttttttcatgatgtatctactcagcaaacagagttgaacctttcttttgagagagcagttttgaaacactctttttgtggaatatgcaagtgggtattaggccagcttggaggatttcccttggaaacgggaatacgtataaaaagcagacagcagcattgtcagaaactactttgtgatgtttgcattcaagtcacagaattgaacactccctttcacagagcaggtttgaaacactctttttgtagtgtctgtaagtgaacatttggattgctttcaggcctaaggtgaaaaaggaaatatcttcccataaaaactagacagaagcattctcagaaacttgtttgtgttgtgtgccctctactgacagagttgaacctttctttgcaaagagcagttttgaaacactctttttgtagaatctgcaagaggatatttggatagctttgaagatttcttgggaaacgggaatgtcttcagataaactctagacagaagcattctcagaaacttctttgggatgtttcaattgaagtcacagtgttgaacattccctttcacagagtaggtttgaaacactctttttgtagtgtctataagtgaacatttggcgtgctttcaggcctaacgtgaaaaaggaaatatcttcccataaaaactagacagaagcattctcagaaacttgttcatgatgtgtgccctctactgacagagttgaacctttctttgcaaagagcagctttgaaacactctttttgtagaatctgcaagaggatatttggatagctttgaggatttcgttggaaacgggtatgtcttcagataaactctagacagaagcattctcagaaacttctttgggatgttgcattcaagtcacagagtagaacattcccattcatagagcagatttgaaacactctttttgtagtatctggaagtggacatttggagcgctttcaggcctatgttgaaaaaggaaatatcttcccataaaaactagacggaagcattctcagaaacttacgtgtgatgtgtttgctcaactaacagaattgaaccatcgttttgaaggagcagttttgaaacactgttttcgtggaatctgcaagtggatatttggctagctttgaggatttcgttggaaacgggattacatataaaaaggagtcagcagcattctcagaaacttctttgtgatgtctgcattcaagtcacagagttgagcattccctttcatagagcaggttggaaacactctttttgtagtatctggatgaggacatttggagcgctttcaggcgtatggtgaaaacggaaatatcttcccgtaaaaactagacagaagcattctcagaagtttatttgtgatgtgtgccctcaactaacagagttgaacctttcttttgatagagcagttttgaaacactctttttgtaaaatctgcaagaggatatttggatagctttgaggatttcgttgcaaacgggaatggcttcatataaactctagacagaagcattctcagaaacttcgtcgggatgtttcgattgaagtcccagtgttgaacattcccttttatagagcaggttggaaacactctttctgcattccctggaagtggacatttggagcgctttcaggacgacggtgaaaatggaaatatcttccaataaaatctggatagaagcaatgtcagaaacttttatgtgatggatctactcagctaacagagttgaacctttcttttgagagagcagttttgcaacactctttttgtggaatatgcaagtggatattagggcagctttgaggatttcgttggaaacgggaatacatgtaaaaagcagacagcagcattctcagaaacttctttgtgatgtttgcattgaagtcacagcagttgaacattccctttgagagagcaggtttgaaacacgccttttgtcatatctggaagtgtccattcggagcgcattcaggcttgtgttgaaaaaggaaatatcctcccataaaaactagacagaagcattctcagaaacttatctgtgatgtatgtactcaactaacagaactaaaccatcgttttgaaggagcagttttgaaacactctttttgcggaatctgcaagtggatatttggctagctgggaggatttcgttggaaacgggattacatacaaaaagcagacagcagcattctcagaaacttctttgtgatgttggcattcaagtcacagagttgaacattccctttcatagagcaggtttgaaacactctttttgtagtatctggatgtggacatttggatcgctttcaggcctatggtgaaaaaggaaatatcttcccatgaaaactagacagaagcattctcagaaacttatttgtgatgtgtgccctcaactgacagtgttgaacctttgttttgatagagcagttctgaaacacactttttgtaaaatctgcaagaggatatttggatagctttgaggatttcgttggaaacgggaatgtcttcatgtaaactctacacagaagcattctcagaaactgctttgggatgtttcaattgaagtcccagtgttgaacattcccattcatagagcaggtttgaaacactctttttgtactatctggaagtggacatttggagcgctttcaggtctacggtgaaaaaggagatatcttccaataaaaactagatagaagcaatgtcagaacttttttcatgatgtatctactcagctaacagagttgaacctttcttttgagagagcagttttgaaacactctttttgtggaatatgcaagtgggtattaggccagcttggaggatttcgttggaaacgggaatacgtataaaaagcagacagcagcattgtcagaaactactttgtgatgtttgcattcaagtcacagaattgaacactccctttcacagagcaggtttgaaacactctttttgtagtgtctataagtgaacatttggcgtgctttcaggcctaaggtgaaaaaggaaatatcttcccataaaaactagacagaagcattctcagaaacttgtttgtgatgtgtgccctctactgacagagttgaacctttctttgcaaagagcagttttgaaacactctttttgtagaatctgcaagaggatatttggatagctttcaggatttcttgggaaacgggaatgtcttcagataaactctagacagaagcattctcagaaacttctttgggatgtttcaattgaagtcacagtgttgaacattccctttcacagagcaggtttgaaacactctttttgtagtatctggaagtggacatttggagcgctttcaggcctatgttgaaaaaggaaatatcttcccataaaaactagacggaagcattctcagaaacttatttgtgatgtgtttgctcaactaacaggattgaaccatcgttttgaaggagcagttttgaaacactgttttcgtggaatctgcaagtggatatttggctagctttgaggatttcgttggaaacgggattacatataaaaaggagacagcagcattctcagaaacttctttgtgatgtctgcattcaattcacagagttgagcattccctttcatagagcaggttggaaacactctttttgtagtatctggatgaggacatttggagcgctttcaggcctatggtgaaaaaggaaatatcttcccgtaaaaactagacagaagcattctcagaagtttatttgtgatgtgtgccctcaactaacagagttgaacctttcttttgatagagcagttttgaaacactctttttgtaaaatctgcaagaggatatttggatagctttgaggatttcgttgcaaacgggaatggcttcatataaactctagacagaagcattctcagaaacttcgttgggatgtttcgattgaagtcccagtgttgaacattcccttttatagagcaggttggaaacactctttctgcattccctggaagtggacatttggagcgctttcaggacgacggtgaaaatggaaatatcttccaagaaaatctagatagaagcaatgtcagaaacttttctgtgatggatctactcagctaacagagttgaacctttcttttgagagagcagttttgcaacactctttttgtggaatatgcaagtggatattagggcagctttgaggatttcgttggaaacgggaatacatgtaaaaaggagacagcagcattctcagaaacttctttgtgatgtttgcattgaagtcacagagttgaacattccctttgagagagcaggtttgaaacacgccttttgtcatatctggaagtgtccattcggagcgcattcaggcttgtgttgaaaaaggaaatatcctcccataaaaactagacagaagcattctcagaaacttatctgtgatgtatgtactcaactaacagaactaaaccatcgttttgaaggagcagttttgaaacactctttttgcggaatctgcaagtggatatttggctagctgggaggatttcgttggaaacgggattacatacaaaaagcagacagcagcattctcagaaactactttgtgatgtttgcattcaagtcacagagttgaacattccctttcatagagcaggtttgaaacactctttttgtagtatctggatgtggacatttggatcgctttcaggcctatggtgaaaaaggaaatatcttcccatgaaaactagacagaagcattctcagcaaacttatttgtgatgtgtgcactcaactgacagtgttgaacctttgttttgatagagcagttctgaaacacactttttgtaaaatctgcaagaggatatttggatagctttgaggatttcgttggaaacgggaatgtcttcatgtaaactctagacagaagcattctcagaaactgctttgggatgtttcaattgaagtcccagtgttgaacattccctttcatagagcaggtttgaaacactctttttgtactatctggaagtggacatttggagcgctttcaggtctacggtgaaaaaggagatatcttccaataaaaactagatagaagcaatgtcagaacttttttcatgatgtatctactcagcaaacagagttgaacctttcttttgagagagcagttttgaaacactccttttgtggaatatgcaagtgggtattaggccagcttggaggatttcgttggaaacgggaatacgtataaaaagcagacagcagcattgtcagaaactactttgtgatgtttgcattcaagtcacagaattgaacactccctttcacagagcaggtttgaaactctctttttgtagtgtctataagtgaacatttggcgtgctttcaggcgtaacgtgaaaaaggaaatatcttcccataaaaactagacagaagcactctcagaaacttgtttgtgatgtgtgccctctactgacagagttgaacctttctttgcaaagagcagttttgaaacactccttttgtagaatctgcaagaggatatttggatagctttgaggatttcttgggaaacgggaatgtcttcagataaactctagacagaagcattctcagaaacttctttgggatgtttcaattgaagtcacagtgttgaacattccctttcacagagcaggtttgaaacactctttttgtagtgtctataagtgaacatttggcgtgctttcaggcgtaacgtgaaaaaggaaatatcttcccataaaaaccagacagaagcattctcagaaacttgttcgtgatgtgtgccctctactgacagagttgaacctttctttgcaaagagcagctttgaaacacactttttgtagaatctgcaagaggatatttggatagctttgaggatttcgttggaaacgggtatgtcttcagatatactctagacagaagcattctcagaaacttctttgggatgttgcattcaagtcacagagtagaacattcccattcatagagcagatttgaaacactctttttgtagtatctggaagtggacatttggagcgctttcaggcctatgttgaaaaaggaaatatcttcccataaaaactagacggaagcattctcagaaacttgtttgtgatgtgtgccctctactgacagagttgaacctttctttgcaaagaccagttttgaaacactctttttgtagaatctgcaagaggatatttggatagctttgaggatttcttgggaaacgggaatgtcttcagataaactctagacagaagcattctcagaaacttctttgggatatttcaattgaagtcacagtgttgaacattccctttcacagagcaggtttgaaacactctttttgtagtgtctataagtgaacatttggcgtgctttcaggcctaacgtgaaaaaggaaatatcttcccataaaaactagacagaagcattctcagaaacttgttcgtgatgtgtgccctctactgacagagttgaacctttctttgcaaagagcagctttgaaacactctttttgtagaatctgcaagaggatatttggatagcttggaggatttcgttggaaacgggtatgtcttcagataaactatagacagaagcattctcagaaacttctttgggatgttgcattcaagtcacagagtagaacattcccattcatagagcagatttgaaacactctttttgtagtatctggaagtggacatttggagcgctttcaggcctatgttgaaaaaggaaatatcttcccataaaaactagacggaagcattctcagaaacttatttgtgatgtgcttgctcaactaacaggattgaaccatcgttttgaaggagcagttttgaaacactgttttcatggaatctgcaagtggatatttggctagctttgaggatttcgttggaaacgggattacatataaaaaggagacagcagcattctcagaaacttctttgtgatgtttgcattcaagtcacagagttgaacattccctttcatagagcaggtttgaaacactctttttgtagtatctggatgtggacatttggatcgctttcaggcctatggtgaaaaaggaaatatcttcccatgaaaactagacagaagcattctcagaaacttatttgtgatgtgtgccctcaactgacagtgttgaacctttgttttgatagagcagttctgagacacactttttgtaaaatctgcaagaggatatttggatagctttgaggatttcgttggaaacgggaatgtcttcatgtaaactctagacagaagcattctcagaaactgctttgggatgtttcaattgaagtcccagtgttgaacattccctttcatagagcaggtttgaaacactctttttgtactatctggaagtggacatttggagcgctttcaggtctacggtgaaaaaaggagatatcttccaataaaaactagatagaagcaatgtcagaacttttttcatgatgtatctactcagcaaacagagttgaacctttcttttgagggagcagttttgaaacactatttttgtggaatatgcaagtgggtattaggccagcttggaggatttcgttggaaacgggaatacgtataaaaagcagacagcagcattgtcagaaactactttgtgatgtttgcattcaagtcacagaattgaacactccctttcacagagcaggtttgaaacactctttttgtagtgtctgtaagtgaacatttggattgctttcaggcctaaggtgaaaaaggaaatatcttcccataaaaactagacagaagcattctcagaaacttgtttgtgatgtgtgccctctactgacagagttgaacctttctttgcaaagagcagttttgaaacactctttttgtagaatctgcaagaggatatttggatagctttgaggatttcttgggaaacgggaatgtcttcagataaactctagacagaagcattctcagaaacttctttgggatgtttcaattgaagtcacagtgttgaacattccctttcacagagcaggtttgaaacactctttttgtagtgtctataagtgaacatttggcgtgctttcaggcctaacgtgaaaaaggaaatatcttcccataaaaactagacagaagcattctcagaaacttgttcatgatgtgtgccctctactgacagagttgaacctttctttgcaaagagcagctttgaaacactctttttgtagaatctgcaagaggatatttggatagctttgaggatttcgttggaaacgggtatgtacttcagataaactctagacagaagcattctcagaaacttctttgggatgttgcattcaagtcacagagtagaacattcccattcatagagcagatttgaaacactctttttgtagtatctggaagtggacatttggagcgctttcaggcctatgttgaaaaaggaaatatcttcccataaaaactagacggaagcgttctcagaaacttatttgtgatgtgtttgctcaactaacaggattgaaccatcgtttggaaggagcagttttgaaacactgttttcgtggaatctgcaagtggatatttggctagctttgaggatttcgttggaaacgggattacatataaaaaggagacagcagcattctcagaaacttctttgtgatgtctgcattcaagtcacagagttgagcattccctttcatagagcaggttggaaacactctttttgtagtatctggatgaggacatttggagcgctttcaggcgtatggtgaaaaaggaaatatcttcccgtaaaaactagacagaagcattctcagaaatttatttgtgatgtgtgccctcaactaacagagttgaacctttcttttgatagagcagttttgaaacactctttttgtaaaatctgcaagaggatatttggatagctttgaggatttcgttgcaaacgggaatggcttcatataaactctagacagaagcattctcagaaacttcgttgggatgtttcgattgaagtcccagtgttgaacattcccttttatagagcaggttggaaacactctttctgcattccctggaagtggacatttggagcgctttcaggacgacggtgaaaatggaaatatcttccaagaaaatctagatagaagcaacgtcagaaacttttctgtgatggatctactcagctaacagagttgaacctttcttttgagagagcagttttgcaacactctttttgtggaatatgcaagtggatattagggcagctttgaggatttcgttggaaacgggaatacatgtaaaaagcagacagcagcattctcagaaacttctttgtgatgtttgcattgaagtcacagagttgaacattccctttgagagagcaggtttgaaacacgccttttgtcatatctggaagtgtccattcggagcgcattcaggcttgtgttgaaaaaggaaatatcgtcccataaaaactagacagaagcattctcagaaacttatctgtgatgtatgtactcaactaacagaactaaaccatcgttttgaaggagcagttttgaaacactctttttgcggaatctgcaagtggatatttggctagctgggaggatttcgttggaaacgggattacatacaaaaagcagacagcagcattctcagaaacttctttgtgatgtttgcattcaagtcacagagttgaacattccctttcatagagcaggtttgaaacaatctttttgtagtatctggatgtggacatttggatcgctttcaggcctatggtgaaaaaggaaatatcttcccatgaaaactagacagaagcattctcagaaacttatttgcgatgtgtgccctcaactgacagtgttgaacctttgttttgatagagcagttctgaaacacactttttgtaaaatctgcaagaggatatttggatagctttgaggatttcgttggaaacgggaatgtcttcatgtaaactctggacagaagcattctcagaaactgctttgggatgtttcaattgaagtcccagtgttgaacattccctttcatagagcaggtttgaaacactctttttgtactatctggaagtggacatttggagcgctttcaggtctacggtgaaaaaggagatatcttccaataaaaactagatagaagcaatgtcagaacttttttcatgatgtatctactcagcaaacagagttgaacctttcttttgagagagcagttttgaaacactctttttgtggaatatgcaagtgggtattaggccagcttggaggatttcgttggaaacgggaatacgtataaaaagcagacagcagcattgtcagaaactactttgtgatgtttgcattcaagtcacagaattgaacactccctttcacagagcaggtttgaaacactctttttgtagtgtctgtaagtgaacatttggattgctttcaggcctaaggtgaaaaaggaaatatcttcccataaaaactagacagaagcattctcagaaacttgtttgtgatgtgtgccctctactgacagagttgaacctttctttgcaaagagcagttttgaaacactctttttgtagaatctgcaagaggatatttggatagctttgaggatttcttgggaaacgggaatgtcttcagataaactctagacagaagcattctcagaaacttctttgggatgtttcaattgaagtcacagtgttgaacattccctttcacagagcaggtttgaaacactctttttgtagtgtctataagtgaacatttggcgtgctttcaggcgtaacgtgaaaaaggaaatatcttcccataaaaaccagacagaagcattctcagaaacttgttcgtgatgtgtgccctctactgacagagttgaacctttctttgcaaagagcagctttgaaacacactttttgtagaatctgcaagaggatatttggatagcttggaggatttcgttggaaacgggtatgtcttcagataaactctagacagaagcattctcagaaacttctttgggatgttgcattcaagtcacagagtagaacattcccattcatagagcagatttgaaacactctttttgtagtatctggaagtggacatttggagcgctttcaggcctatgttgaaaaaggaaatatcttcccataaaaactagacggaagcattctcagaaacttatttgtgatgtgtttgctcaactaacaggattgaaccatcgttttgaaggagcagttttgaaacactgttttcgtggaatctgcaagtggatatttggctagctttgaggatttcgttggaaacgggattacatataaaaaggagacagcagcattctcagaaacttctttgtgatgtctgcattcaattcacagagttgagcattccctttcatagagcaggttggaaacactctttttgtagtatctggatgaggacatttggagcgctttcaggcgtatggtgaaaaaggaaatatcttcccgtaaaaactagacagaagcattctcagaagtttatttgtgatgtgtgccctcaactaacagagttgaacctttcttttgatagagcagttttgaaacactctttttgtaaaatctgcaagaggatatttggatagctttgaggatttcgttgcaaacgggaatggcttcatataaactctagacagaagcattctcagaaacttcgttgggatgtttcgattgaagtcccagtgttgaacattcccttttatagagcaggttggaaacactctttctgcattccctggaagtggacatttggagcgctttcaggacgacggtgaaaatggaaatatcttccaagaaaatctagatagaagcaacgtcagaaacttttctgtgatggatctactcagctaacagagttgaacctttcttttgagagagcagttttgcaacactctttttgtggaatatgcaagtggatattagggcagctttgaggatttcgttggaaacgggaatacatgtaaaaagcagacagcagcattctcagaaacttctttgtgatgtttgcattgaagtcacagagttgaacattccctttgagagagcaggtttgaaacacgccttttgtcatatctggaagtgtccattcggagcgcattcaggcttgtgttgaaaaaggaaatatcctcccataaaaactagacagaagcattctcagaaacttatctgtgatgtatgtactcaactaacagaactaaaccatcgttttgaaggagcagttttgaaacactctttttgcggaatctgcaagtggatatttggctagctgggaggatttcgttggaaacgggattacatacaaaaagcagacagcagcattctcagaaacttctttgtgatgtttgcattcaagtcacagagttgaacattccctttcatagagcaggtttgaaacactctttttgtagtatctggatgtggacatttggatcgctttcaggcctatggtgaaaaaggaaatatcttcccatgaaaactagacagaagcattctcagaaacttatttgtgatgtgtgccctcaactgacagtgttgaacctttgttttgatagagcagttctgaaacacactttttgtaaaatctgcaagaggatatttggatagatttgaggatttcgttggaaacgggaatgtcttcatgtaaactctacacagaagcattctcagaaactgctttgggatgtttcaattgaagtcccagtgttgaacattccctttaatagagcaggtttgaaacactctttttgtactatctggaagtggacatttggagcgctttcaggtctacggtgaaaaaggatatatcttccaataaaaactagatagaagcaatgtcagaacttttttcatgatgtatctactcagcaaacagagttgaacctttcttttgagagagcagttttgaaacactctttttgtggaatatgcaagtgggtattaggccagcttggaggatttcgttggaaacgggaatacgtataaaaagcagacagcagcattgtcagaaactactttgtgatgtttgcattcaagtcacagaattgaacactccctttcacagagcaggtttgaaacactctttttgtagtgtctgtaagtgaacatatggattgctttcaggcctaaggtgaaaaaggaaatatcttcccataaaaactagacagaagcattctcagaaacttgtttgtgatgtgtgccctctactgacagagttgaacctttctttgcaaagagcagttttgaaacactctttttgtagaatctgcaagaggatatttggatagctttgaagatttcttgggaaacgggaatgtcttcagataaactctagacagaagcattctcagaaacttctttgggatgtttcaattgaagtcacagtgttgaacattccctttcacagagcaggtttgaaacactctttttgtagtgtctataagtgaacatttggcgtgctttcaggcctaacgtgaaaaaggaaatatcttcccataaaaactagacagaagcattctcagaaacttgttcatgatgtgtgccctctactgacagagttgaacctttctttgcaaagagcagctttgaaacactctttttgtagaatctgcaagaggatatttggatagctttgaggatttcgttggaaacgggtatgtcttcagataaactctagacagaagcattctcagaaacttctttgggatgttgcattcaagtcacagagtagaacattcccattcatagagcagatttgaaacactctttttgtagtatctggaagtggacatttggagcgctttcaggcctatgttgaaaaaggaaatatcttcccataaaaactagacggaagcattctcagaaacttacttgtgatgtgtttgctcaactaacagaattgaaccatcgttttgatggagcagttttgaaacactgttttcgtggaatctgcaagtggatatttggctagctttgaggatttcgttggaaacgggattacatataaaaaggagacagcagcattctcagaaacttctttgtgatgtctgcattcaattcacagagttgagcatt
